(19) United States
(12) Patent Application Publication
(10) Pub. No.: US 2015/0275312 A1
(43) Pub. Date: Oct. 1, 2015

(54) METHOD AND NUCLEIC ACIDS FOR THE ANALYSIS OF A COLON CELL PROLIFERATIVE DISORDER

(71) Applicant: EPIGENOMICS AG, BERLIN (DE)

(72) Inventors: Peter Adorjan, Berlin (DE); Matthias Burger, Berlin (DE); Sabine Maier, Berlin (DE); Inko Nimmrich, Berlin (DE); Evelyne Becker, Berlin (DE); Ralf Lesche, Berlin (DE); Tamas Rujan, Berlin (DE); Armin Schmitt, Breitengueszbach (DE)

(21) Appl. No.: 14/553,566

(22) Filed: Nov. 25, 2014

Related U.S. Application Data
(63) Continuation of application No. 10/506,111, filed on Sep. 16, 2005, now abandoned.

(30) Foreign Application Priority Data
Feb. 27, 2002 (EP) 02004551.4

(51) Int. Cl. C12Q 1/68

(52) U.S. Cl. CPC C12Q 1/6886; C12Q 2600/154

(57) ABSTRACT

The present invention relates to modified and genomic sequences, to oligonucleotides and/or PNA-oligomers for detecting the cytosine methylation state of genomic DNA, as well as to a method for ascertaining genetic and/or epigenetic parameters of genes for use in the differentiation, diagnosis, treatment and/or monitoring of colon cell proliferative disorders, or the predisposition to colon cell proliferative disorders.

### CROSS REFERENCE TO RELATED APPLICATIONS

[0001] This application is a continuation application of U.S. application Ser. No. 10/506,111, filed Sep. 16, 2005, now pending; which is a 35 USC §371 National Stage application of International Application No. PCT/EP03/02035, filed Feb. 27, 2003, now expired; which claims the benefit of priority to EP 02002551.4, filed Feb. 27, 2002, now expired. The disclosure of each of the prior applications is considered part of, and is incorporated by reference in, the disclosure of this application.

### BACKGROUND OF THE INVENTION

[0002] 1. Field of the Invention

[0003] Aspects of the invention relate generally to cellular proliferative disorders (e.g., cancer) and genomic DNA methylation, and more particularly to modified and genomic sequences, to oligonucleotides and/or PNA-oligomers for detecting the cytosine methylation state of genomic DNA, as well as to methods for ascertaining genetic and/or epigenetic parameters of genes for use in the differentiation, diagnosis, prognosis, treatment and/or monitoring of cellular proliferative disorders (e.g., cancer) including colon cell proliferative disorders, or the predisposition to colon cell proliferative disorders.

[0004] 2. Background Information

[0005] The levels of observation that have been studied by the methodological developments of recent years in molecular biology, are the genes themselves, the translation of these genes into RNA, and the resulting proteins. The question of which gene is switched on at which point in the course of the development of an individual, and how the activation and inhibition of specific genes in specific cells and tissues are controlled is correlatable to the degree and character of the methylation of the genes or of the genome. In this respect, pathogenic conditions may manifest themselves in a changed methylation pattern of individual genes or of the genome.

[0006] Colorectal cancer is the fourth leading cause of cancer mortality in men and women, although ranking third in frequency in men and second in women. The 5-year survival rate is 61% over all stages with early detection being a prerequisite for curative therapy of the disease. Up to 95% of all colorectal cancers are adenocarcinomas of varying differentiation grades.

[0007] Sporadic colon cancer develops in a multistep process starting with the pathologic transformation of normal colonic epithelium to an adenoma which consecutively progresses to invasive cancer. The progression rate of benign colonic adenomas depends strongly on their histologic appearance: whereas tubular-type adenomas tend to progress to malignant tumors very rarely, villous adenomas, particularly if larger than 2 cm in diameter, have a significant malignant potential.

[0008] During progression from benign proliferative lesions to malignant neoplasms several genetic and epigenetic alterations occur. Somatic mutation of the APC gene seems to be one of the earliest events in 75 to 80% of colorectal adenomas and carcinomas. Activation of K-RAS is thought to be a critical step in the progression towards a malignant phenotype. Consecutively, mutations in other oncogenes as well as alterations leading to inactivation of tumour suppressor genes accumulate.

[0009] Aberrant DNA methylation within CpG islands is among the earliest and most common alterations in human malignancies leading to abrogation or overexpression of a broad spectrum of genes. In addition, abnormal methylation has been shown to occur in CpG rich regulatory elements in intronic and coding parts of genes for certain tumours. In contrast to the specific hypermethylation of tumour suppressor genes, an overall hypomethylation of DNA can be observed in tumour cells. This decrease in global methylation can be detected early, far before the development of frank tumour formation. Also, correlation between hypomethylation and increased gene expression was reported for many oncogenes. In colon cancer, aberrant DNA methylation constitutes one of the most prominent alterations and inactivates many tumor suppressor genes such as pl4ARF, pl6INK4a, THBS1, M3NT2, and M3NT31 and DNA mismatch repair genes such as hMLH1.

[0010] In the molecular evolution of colorectal cancer, DNA methylation errors have been suggested to play two distinct roles. In normal colonic mucosa cells, methylation errors accumulate as a function of age or as time-dependent events predisposing these cells to neoplastic transformation. For example, hypermethylation of several loci could be shown to be already present in adenomas, particularly in the tubulovillous and villous subtype. At later stages, increased DNA methylation of CpG islands plays an important role in a subset of tumours affected by the so called CpG island methylator phenotype (CIMP). Most CIMP+ tumours, which constitute about 15% of all sporadic colorectal cancers, are characterised by microsatellite instability (MIN) due to hypermethylation of the hMLH1 promoter and other DNA mismatch repair genes. By contrast, CIMP-colon cancers evolve along a more classic genetic instability pathway (CIN), with a high rate of p53 mutations and chromosomal changes.

[0011] However, the molecular subtypes do not only show varying frequencies regarding molecular alterations. According to the presence of either micro satellite instability or chromosomal aberrations, colon cancer can be subclassified into two classes, which also exhibit significant clinical differences. Almost all MIN tumours originate in the proximal colon (ascending and transversum), whereas 70% of CIN tumours are located in the distal colon and rectum. This has been attributed to the varying prevalence of different carcinogens in different sections of the colon. Methylating carcinogens, which constitute the prevailing carcinogen in the proximal colon have been suggested to play a role in the pathogenesis of MIN cancers, whereas CIN tumours are thought to be more frequently caused by adduct-forming carcinogens, which occur more frequently in distal parts of the colon and rectum. Moreover, MIN tumours have a better prognosis than do tumours with a CIN phenotype and respond better to adjuvant chemotherapy.

[0012] The identification of markers for the differentiation of colon carcinoma as well as for early detection are main goals of current research.

[0013] 5-methylcytosine is the most frequent covalent base modification in the DNA of eukaryotic cells. It plays a role, for example, in the regulation of the transcription, in genetic imprinting, and in tumorigenesis. Therefore, the identification of 5-methylcytosine as a component of genetic information is of considerable interest. However, 5-methylcytosine positions cannot be identified by sequencing since 5-methylcytosine has the same base pairing behaviour as cytosine. Moreover, the epigenetic information carried by 5-methylcytosine is completely lost during PCR amplification.

[0014] A relatively new and currently the most frequently used method for analysing DNA for 5-methylcytosine is based upon the specific reaction of bisulfite with cytosine which, upon subsequent alkaline hydrolysis, is converted to uracil which corresponds to thymidine in its base pairing behaviour. However, 5-methylcytosine remains unmodified under these conditions. Consequently, the original DNA is converted in such a manner that methylcytosine, which originally could not be distinguished from cytosine by its hybridisation behaviour, can now be detected as the only remaining cytosine using “normal” molecular biological techniques, for example, by amplification and hybridisation or sequencing. All of these techniques are based on base pairing which can now be fully exploited. In terms of sensitivity, the prior art is defined by a method which encloses the DNA to be analysed in an agarose matrix, thus preventing the diffusion and renaturation of the DNA (bisulfite only reacts with single-stranded DNA), and which replaces all precipitation and purification steps with fast dialysis (Olek A, Oswald J, Walter J. A modified and improved method for bisulphite based cytosine methylation analysis. Nucleic Acids Res. 1996 Dec. 15; 24(24):5064-6). Using this method, it is possible to analyse individual cells, which illustrates the potential of the method. However, currently only individual regions of a length of up to approximately 3000 base pairs are analysed, a global analysis of cells for thousands of possible methylation events is not possible. However, this method cannot reliably analyse very small fragments from small sample quantities either. These are lost through the matrix in spite of the diffusion protection.

[0015] An overview of the further known methods of detecting 5-methylcytosine may be gathered from the following review article: Rein, T., DePamphilis, M. L., Zorbas, H., Nucleic Acids Res. 1998, 26, 2255.

[0016] To date, barring few exceptions (e.g., Zeschnigk M, Lich C, Buiting K, Doerfler W. Horsthemke B. A single-tube PCR test for the diagnosis of Angelman and Prader-Willi syndrome based on allelic methylation differences at the SNRPN locus. Eur J Hum Genet. 1997 March-April; 5(2):94-8) the bisulfite technique is only used in research. Always, however, short, specific fragments of a known gene are amplified subsequent to a bisulfite treatment and either completely sequenced (Olek A, Walter J. The pre-implantation ontogeny of the HI 9 methylation imprint. Nat Genet. 1997 November; 17(3):275-6) or individual cytosine positions are detected by a primer extension reaction (Gonzalgo M L, Jones P A. Rapid quantitation of methylation differences at specific sites using methylation-sensitive single nucleotide primer extension (Ms-SNuPE). Nucleic Acids Res. 1997 Jun. 15; 25(12):2529-31, WO 95/00669) or by enzymatic digestion (Xiong Z, Laird P W. COBRA: a sensitive and quantitative DNA methylation assay. Nucleic Acids Res. 1997 Jun. 15; 25(12):2532-4). In addition, detection by hybridisation has also been described (Olek et al., WO 99/28498).

[0017] Further publications dealing with the use of the bisulfite technique for methylation detection in individual genes are: Grigg G, Clark S. Sequencing 5-methylcytosine residues in genomic DNA. Bioessays. 1994 June; 16(6):431-6, 431; Zeschnigk M, Schmitz B, Dittrich B, Buffing K, Horsthemke B, Doerfler W. Imprinted segments in the human genome: different DNA methylation patterns in the Prader-Willi/Angelman syndrome region as determined by the genomic sequencing method. Hum Mol Genet. 1997 March; 6(3):387-95; Feil R, Charlton J, Bird A P, Walter J, Reik W. Methylation analysis on individual chromosomes: improved protocol for bisulphite genomic sequencing. Nucleic Acids Res. 1994 Feb. 25; 22(4):695-6; Martin V, Ribieras S, Song-Wang X, Rio M C, Dante R. Genomic sequencing indicates a correlation between DNA hypomethylation in the 5′ region of the pS2 gene and its expression in human breast cancer cell lines. Gene. 1995 May 19; 157(1-2):261-4; WO 97/46705 and WO 95/15373.

[0018] An overview of the Prior Art in oligomer array manufacturing can be gathered from a special edition of Nature Genetics (Nature Genetics Supplement, Volume 21, January 1999), published in January 1999, and from the literature cited therein.

[0019] Fluorescently labelled probes are often used for the scanning of immobilised DNA arrays. The simple attachment of Cy3 and Cy5 dyes to the 5′-OH of the specific probe are particularly suitable for fluorescence labels. The detection of the fluorescence of the hybridised probes may be carried out, for example via a confocal microscope. Cy3 and Cy5 dyes, besides many others, are commercially available.

[0020] Matrix Assisted Laser Desorption Ionization Mass Spectrometry (MALDI-TOF) is a very efficient development for the analysis of biomolecules (Karas M, Hillenkamp F. Laser desorption ionisation of proteins with molecular masses exceeding 10,000 daltons. Anal Chem. 1988 Oct. 15; 60(20):2299-301). An analyte is embedded in a light-absoRBing matrix. The matrix is evaporated by a short laser pulse thus transporting the analyte molecule into the vapour phase in an unfragmented manner. The analyte is ionised by collisions with matrix molecules. An applied voltage accelerates the ions into a field-free flight tube. Due to their different masses, the ions are accelerated at different rates. Smaller ions reach the detector sooner than bigger ones.

[0021] MALDI-TOF spectrometry is excellently suited to the analysis of peptides and proteins. The analysis of nucleic acids is somewhat more difficult (Gut I G, Beck S. DNA and Matrix Assisted Laser Desorption Ionisation Mass Spectrometry. Current Innovations and Future Trends. 1995, 1; 147-57). The sensitivity to nucleic acids is approximately 100 times worse than to peptides and decreases disproportionally with increasing fragment size. For nucleic acids having a multiply negatively charged backbone, the ionisation process via the matrix is considerably less efficient. In MALDI-TOF spectrometry, the selection of the matrix plays an eminently important role. For the desorption of peptides, several very efficient matrixes have been found which produce a very fine crystallisation. There are now several responsive matrixes for DNA, however, the difference in sensitivity has not been reduced. The difference in sensitivity can be reduced by chemically modifying the DNA in such a manner that it becomes more similar to a peptide. Phosphorothioate nucleic acids in which the usual phosphates of the backbone are substituted with thiophosphates can be converted into a charge-neutral DNA using simple alkylation chemistry (Gut I G, Beck S. A procedure for selective DNA alkylation and detection by mass spectrometry. Nucleic Acids Res. 1995 Apr. 25; 23(8):1367-73). The coupling of a charge tag to this modified DNA results in an increase in sensitivity to the same level as that found for peptides. A further advantage of charge tagging is the increased stability of the analysis against impurities which make the detection of unmodified substrates considerably more difficult.

[0022] Genomic DNA is obtained from DNA of cell, tissue or other test samples using standard methods. This standard methodology is found in references such as Sambrook, Fritsch and Maniatis eds., Molecular Cloning: A Laboratory Manual, 1989.

### DESCRIPTION

[0023] The invention provide a method for the analysis of biological samples for features associated with the development of colon cell proliferative disorders, characterised in that the nucleic acid of at least one member of the group comprising MDR1, APOC2, CACNA1G, EGR4, AR, RB1, GPIb beta, MYOD1, WT1, HLA-F, ELK1, APC, BCL2, CALCA, CDH1, CDKN1A, CDKN1B (p27 Kip1), CDKN2a, CDKN2B, CD44, CSPG2, DAPK1, EGFR, EYA4, GSTP1, GTBP/MSH6, HIC-1, HRAS, IGF2, LKB1, MGMT, MLH1, MNCA9, MSH3, MYC, N33, PAX6, PGR, PTEN, RARB, SFN, S100A2, TGFBR2, TIMP3, TP53, TP73, VHL, CDKN1C, CAV1, CDH13, DRG1, PTGS2, THBS1, TPEF (=TMEFF2; =HPP1), DNMT1, CEA, MB, PCNA, CDC2, ESR1, CASP8, RASSF1, MSH4, MSH5 is/are contacted with a reagent or series of reagents capable of distinguishing between methylated and non methylated CpG dinucleotides within the genomic sequence of interest.

[0024] The present invention makes available a method for ascertaining genetic and/or epigenetic parameters of genomic DNA. The method is for use in the improved diagnosis, treatment and monitoring of colon cell proliferative disorders, more specifically by enabling the improved identification of and differentiation between subclasses of said disorder and the genetic pre-disposition to said disorders. The invention presents improvements over the state of the art in that it enables a highly specific classification of colon carcinomas, thereby allowing for improved and informed treatment of patients.

[0025] In a particularly preferred embodiment the present invention makes available methods and nucleic acids that allow the differentiation between colon carcinoma, colon adenoma and normal colon tissue.

[0026] Furthermore, the method enables the analysis of cytosine methylations and single nucleotide polymorphisms.

[0027] The genes that form the basis of the present invention can be used to form a “gene panel”, i.e. a collection comprising the particular genetic sequences of the present invention and/or their respective informative methylation sites. The formation of gene panels allow for a quick and specific analysis of the disorders they are related with. The gene panels described in this invention can be used with surprisingly high efficiency for the diagnosis, treatment and monitoring of and the analysis of colon cell proliferative disorders as described herein. The use of multiple CpG sites from a diverse array of genes, allows for a relatively high degree of sensitivity and specificity in comparison to single gene diagnostic and detection tools. Furthermore, the panel as described herein may be adapted for use in the analysis of many aspects of colon cell proliferative disorders.

[0028] In a preferred embodiment, the method comprises the following steps:

[0029] In the first step of the method the genomic DNA sample must be isolated from tissue or cellular sources. Such sources may include colon tissue samples, cell lines, histological slides, body fluids, or tissue embedded in paraffin. Extraction may be by means that are standard to one skilled in the art, these include the use of detergent lysates, sonification and vortexing with glass beads. Once the nucleic acids have been extracted the genomic double stranded DNA is used in the analysis.

[0030] In a preferred embodiment the DNA may be cleaved prior to the next step of the method, this may be by any means standard in the state of the art, in particular, but not limited to, with restriction endonucleases.

[0031] In the second step of the method, the genomic DNA sample is treated in such a manner that cytosine bases which are unmethylated at the 5′-position are converted to uracil, thymine, or another base which is dissimilar to cytosine in terms of hybridisation behaviour. This will be understood as ‘pretreatment’ hereinafter.

[0032] The above described treatment of genomic DNA is preferably carried out with bisulfite (sulfite, disulfite) and subsequent alkaline hydrolysis which results in a conversion of non-methylated cytosine nucleobases to uracil or to another base which is dissimilar to cytosine in terms of base pairing behaviour. If bisulfite solution is used for the reaction, then an addition takes place at the non-methylated cytosine bases. Moreover, a denaturating reagent or solvent as well as a radical interceptor must be present. A subsequent alkaline hydrolysis then gives rise to the conversion of non-methylated cytosine nucleobases to uracil. The chemically converted DNA is then used for the detection of methylated cytosines.

[0033] Fragments of the pretreated DNA are amplified, using sets of primer oligonucleotides according to SEQ ID NO: 389 to SEQ ID NO: 518, and a, preferably heat-stable, polymerase. Because of statistical and practical considerations, preferably more than ten different fragments having a length of 100-2000 base pairs are amplified. The amplification of several DNA segments can be carried out simultaneously in one and the same reaction vessel. Usually, the amplification is carried out by means of a polymerase chain reaction (PCR).

[0034] The method may also be enabled by the use of alternative primers, the design of such primers is obvious to one skilled in the art. These should include at least two oligonucleotides whose sequences are each reverse complementary or identical to an at least 18 base-pair long segment of the base sequences specified in the appendix (SEQ ID NO: 133 to SEQ ID NO: 388). Said primer oligonucleotides are preferably characterised in that they do not contain any CpG dinucleotides. In a particularly preferred embodiment of the method, the sequence of said primer oligonucleotides are designed so as to selectively anneal to and amplify, only the colon tissue specific DNA of interest, thereby minimising the amplification of background or non relevant DNA. In the context of the present invention, background DNA is taken to mean genomic DNA which does not have a relevant tissue specific methylation pattern, in this case, the relevant tissue being colon, both healthy and diseased.

[0035] According to the present invention, it is preferred that at least one primer oligonucleotide is bound to a solid phase during amplification. The different oligonucleotide and/or PNA-oligomer sequences can be arranged on a plane solid phase in the form of a rectangular or hexagonal lattice, the solid phase surface preferably being composed of silicon, glass, polystyrene, aluminium, steel, iron, copper, nickel, silver, or gold, it being possible for other materials such as nitrocellulose or plastics to be used as well.

[0036] The fragments obtained by means of the amplification can carry a directly or indirectly detectable label. Preferred are labels in the form of fluorescence labels, radionuclides, or detachable molecule fragments having a typical mass which can be detected in a mass spectrometer, it being preferred that the fragments that are produced have a single positive or negative net charge for better detectability in the mass spectrometer. The detection may be carried out and visualised by means of matrix assisted laser desorption/ionisation mass spectrometry (MALDI) or using electron spray mass spectrometry (ESI).

[0037] The amplificates obtained in the second step of the method are subsequently hybridised to an array or a set of oligonucleotides and/or PNA probes. In this context, the hybridisation preferably takes place in the manner described as follows. The set of probes used during the hybridisation is preferably composed of at least 10 oligonucleotides or PNA-oligomers. However, it is understood and as well claimed, that the process can be conducted using only one Oligonucleotide or PNA probe. In the process, the amplificates hybridise to oligonucleotides previously bonded to a solid phase. In a particularly preferred embodiment, the oligonucleo-tides are taken from the group comprising SEQ ID NO: 519 to SEQ ID NO: 1030. In a further preferred embodiment the oligonucleotides are taken from the group comprising SEQ ID NO: 895 to SEQ ID NO: 1030. The non-hybridised fragments are subsequently removed. Said oligonucleotides contain at least one base sequence having a length of 10 nucleotides which is reverse complementary or identical to a segment of the base sequences specified in the appendix, the segment containing at least one CpG or TpG dinucleotide. In a further preferred embodiment the cytosine of the CpG dinucleotide, or in the case of TpG, the thiamine, is the 5^{th} to 9^{th} nucleotide from the 5′-end of the 10-mer. One oligonucleotide exists for each CpG or TpG dinucleotide.

[0038] In the fifth step of the method, the non-hybridised amplificates are removed.

[0039] In the final step of the method, the hybridised amplificates are detected. In this context, it is preferred that labels attached to the amplificates are identifiable at each position of the solid phase at which an oligonucleotide sequence is located.

[0040] According to the present invention, it is preferred that the labels of the amplificates are fluorescence labels, radionuclides, or detachable molecule fragments having a typical mass which can be detected in a mass spectrometer. The mass spectrometer is preferred for the detection of the amplificates, fragments of the amplificates or of probes which are complementary to the amplificates, it being possible for the detection to be carried out and visualised by means of matrix assisted laser desorption/ionisation mass spectrometry (MALDI) or using electron spray mass spectrometry (ESI). The produced fragments may have a single positive or negative net charge for better detectability in the mass spectrometer.

[0041] The aforementioned method is preferably used for ascertaining genetic and/or epigenetic parameters of genomic DNA.

[0042] In order to enable this method, the invention further provides the modified DNA of genes MDR1, APOC2, CACNA1G, EGR4, AR, RB1, GPIb beta, MYOD1, WT1, HLA-F, ELK1, APC, BCL2, CALCA, CDH1, CDKN1A, CDKN1B (p27 Kip1), CDKN2a, CDKN2B, CD44, CSPG2, DAPK1, EGFR, EYA4, GSTP1, GTBP/MSH6, HIC-1, HRAS, IGF2, LKB1, MGMT, MLH1, MNCA9, MSH3, MYC, N33, PAX6, PGR, PTEN, RARB, SFN, S100A2, TGFBR2, TIMP3, TP53, TP73, VHL, CDKN1C, CAV1, CDH13, DRG1, PTGS2, THBS1, TPEF (=TMEFF2; =HPP1), DNMT1, CEA, MB, PCNA, CDC2, ESR1, CASP8, RASSF1, MSH4, MSH5 as well as oligonucleotides and/or PNA-oligomers for detecting cytosine methylations within said genes. The present invention is based on the discovery that genetic and epigenetic parameters and, in particular, the cytosine methylation patterns of genomic DNA are particularly suitable for improved diagnosis, treatment and monitoring of colon cell proliferative disorders. Furthermore, the invention enables the differentiation between different subclasses of colon cell proliferative disorders or detection of a predisposition to colon cell proliferative disorders.

[0043] The nucleic acids according to the present invention can be used for the analysis of genetic and/or epigenetic parameters of genomic DNA.

[0044] This objective is achieved according to the present invention using a nucleic acid containing a sequence of at least 18 bases in length of the pretreated genomic DNA according to one of SEQ ID NO: 133 to SEQ ID NO: 388 and sequences complementary thereto.

[0045] The modified nucleic acid could heretofore not be connected with the ascertainment of disease relevant genetic and epigenetic parameters.

[0046] The object of the present invention is further achieved by an oligonucleotide or oligomer for the analysis of pretreated DNA, for detecting the genomic cytosine methylation state, said oligonucleotide containing at least one base sequence having a length of at least 10 nucleotides which hybridises to a pretreated genomic DNA according to SEQ ID NO: 133 through to SEQ ID NO: 388. The oligomer probes according to the present invention constitute important and effective tools which, for the first time, make it possible to ascertain specific genetic and epigenetic parameters during the analysis of biological samples for features associated with the development of colon cell proliferative disorders. Said oligonucleotides allow the improved diagnosis, treatment and monitoring of colon cell proliferative disorders and detection of the predisposition to said disorders. Furthermore, they allow the differentiation of different subclasses of colon cell proliferative disorders. The base sequence of the oligomers preferably contains at least one CpG or TpG dinucleotide. The probes may also exist in the form of a PNA (peptide nucleic acid) which has particularly preferred pairing properties. Particularly preferred are oligonucleotides according to the present invention in which the cytosine of the CpG dinucleotide is the 5^{th}-9^{th} nucleotide from the 5′-end of the 13-mer; in the case of PNA-oligomers, it is preferred for the cytosine of the CpG dinucleotide to be the 4th-6th nucleotide from the 5′-end of the 9-mer.

[0047] The oligomers according to the present invention are normally used in so called “sets” which contain at least one oligomer for each of the CpG dinucleotides within SEQ ID NO: 133 through SEQ ID NO: 388. Preferred is a set which contains at least one oligomer for each of the CpG dinucleotides, from SEQ ID NO: 519 to SEQ ID NO: 1030. Further preferred is a set comprising SEQ ID NO: 895 to SEQ ID NO: 1030.

[0048] In the case of the sets of oligonucleotides according to the present invention, it is preferred that at least one oligonucleotide is bound to a solid phase. It is further preferred that all the oligonucleotides of one set are bound to a solid phase.

[0049] The present invention moreover relates to a set of preferably at least 10 n (oligonucleotides and/or PNA-oligomers) used for detecting the cytosine methylation state of genomic DNA using treated versions of said genomic DNA (according to SEQ ID NO: 133 to SEQ ID NO: 388 and sequences complementary thereto). However, it is understood and as well claimed, that the process can be conducted using only one Oligonucleotide or PNA oligomer. These probes enable improved diagnosis, treatment and monitoring of colon cell proliferative disorders. In particular they enable the differentiation between different sub classes of colon cell proliferative disorders and the detection of a predisposition to said disorders. In a particularly preferred embodiment the set comprises SEQ ID NO: 519 to SEQ ID NO: 1030.

[0050] The set of oligomers may also be used for detecting single nucleotide polymorphisms (SNPs) using pretreated genomic DNA according to one of SEQ ID NO: 133 to SEQ ID NO: 388.

[0051] According to the present invention, it is preferred that an arrangement of different oligonucleotides and/or PNA-oligomers (a so-called “array”) made available by the present invention is present in a manner that it is likewise bound to a solid phase. This array of different oligonucleotide- and/or PNA-oligomer sequences can be characterised in that it is arranged on the solid phase in the form of a rectangular or hexagonal lattice. The solid phase surface is preferably composed of silicon, glass, polystyrene, aluminium, steel, iron, copper, nickel, silver, or gold. However, nitrocellulose as well as plastics such as nylon which can exist in the form of pellets or also as resin matrices are suitable alternatives.

[0052] Therefore, a further subject matter of the present invention is a method for manufacturing an array fixed to a carrier material for the improved diagnosis, treatment and monitoring of colon cell proliferative disorders, the differentiation between different subclasses of colon cell proliferative disorders and/or detection of the predisposition to colon cell proliferative disorders. In said method at least one oligomer according to the present invention is coupled to a solid phase. Methods for manufacturing such arrays are known, for example, from U.S. Pat. No. 5,744,305 by means of solid-phase chemistry and photolabile protecting groups.

[0053] A further subject matter of the present invention relates to a DNA chip for the improved diagnosis, treatment and monitoring of colon cell proliferative disorders. Furthermore the DNA chip enables detection of the predisposition to colon cell proliferative disorders and the differentiation between different subclasses of colon cell proliferative disorders. The DNA chip contains at least one nucleic acid according to the present invention. DNA chips are known, for example, in U.S. Pat. No. 5,837,832.

[0054] Moreover, a subject matter of the present invention is a kit which may be composed, for example, of a bisulfite-containing reagent, a set of primer oligonucleotides containing at least two oligonucleotides whose sequences in each case correspond or are complementary to a 18 base long segment of the base sequences specified in the appendix (SEQ ID NO: 133 to SEQ ID NO: 388), oligonucleotides and/or PNA-oligomers as well as instructions for carrying out and evaluating the described method. However, a kit along the lines of the present invention can also contain only part of the aforementioned components.

[0055] The oligomers according to the present invention or arrays thereof as well as a kit according to the present invention are intended to be used for the improved diagnosis, treatment and monitoring of colon cell proliferative disorders. Furthermore the use of said inventions extends to the differentiation between different subclasses of colon cell proliferative disorders and detection of the predisposition to colon cell proliferative disorders. According to the present invention, the method is preferably used for the analysis of important genetic and/or epigenetic parameters within genomic DNA, in particular for use in improved diagnosis, treatment and monitoring of colon cell proliferative disorders, detection of the predisposition to said disorders and the differentiation between subclasses of said disorders.

[0056] The methods according to the present invention are vised, for example, for improved diagnosis, treatment and monitoring of colon cell proliferative disorders progression, detection of the predisposition to said disorders and the differentiation between subclasses of said disorders. A further embodiment of the invention is a method for the analysis of the methylation status of genomic DNA without the need for pretreatment. In the first step of the method the genomic DNA sample must be isolated from tissue or cellular sources. Such sources may include cell lines, histological slides, body fluids, or tissue embedded in paraffin. Extraction may be by means that are standard to one skilled in the art, these include the use of detergent lysates, sonification and vortexing with glass beads. Once the nucleic acids have been extracted the genomic double stranded DNA is used in the analysis.

[0057] In a preferred embodiment the DNA may be cleaved prior to the treatment, this may be any means standard in the state of the art, in particular with restriction endonucleases. In the second step, the DNA is then digested with one or more methylation sensitive restriction enzymes. The digestion is carried out such that hydrolysis of the DNA at the restriction site is informative of the methylation status of a specific CpG dinucleotide.

[0058] In the third step the restriction fragments are amplified. In a preferred embodiment this is carried out using a polymerase chain reaction.

[0059] In the final step the amplificates are detected. The detection may be by any means standard in the art, for example, but not limited to, gel electrophoresis analysis, hybridisation analysis, incorporation of detectable tags within the PCR products, DNA array analysis, MALDI or ESI analysis.

[0060] The present invention moreover relates to the diagnosis and/or prognosis of events which are disadvantageous or relevant to patients or individuals in which important genetic and/or epigenetic parameters within genomic DNA, said parameters obtained by means of the present invention may be compared to another set of genetic and/or epigenetic parameters, the differences serving as the basis for the diagnosis and/or prognosis of events which are disadvantageous or relevant to patients or individuals.

[0061] In the context of the present invention the term “hybridisation” is to be understood as a bond of an oligonucleotide to a completely complementary sequence along the lines of the Watson-Crick base pairings in the sample DNA, forming a duplex structure.

[0062] In the context of the present invention, “genetic parameters” are mutations and polymorphisms of genomic DNA and sequences further required for their regulation. To be designated as mutations are, in particular, insertions, deletions, point mutations, inversions and polymorphisms and, particularly preferred, SNPs (single nucleotide polymorphisms).

[0063] In the context of the present invention “methylation state analysis” is taken to mean the analysis of cytosines within a nucleic acid in order to ascertain whether they are methylated or not. In the context of the present invention, “epigenetic parameters” are, in particular, cytosine methylations and further modifications of DNA bases of genomic DNA and sequences further required for their regulation. Further epigenetic parameters include, for example, the acetylation of histones which, cannot be directly analysed using the described method but which, in turn, correlates with the DNA methylation.

[0064] In the following, the present invention will be explained in greater detail on the basis of the sequences and examples without being limited thereto.

[0065] SEQ ID NO: 1 to SEQ ID NO: 64 represent 5′ and/or regulatory regions of the genomic DNA of genes MDR1, APOC2, CACNA1G, EGR4, AR, RB1, GPIb beta, MYOD1, WT1, HLA-F, ELK1, APC, BCL2, CALCA, CDH1, CDKN1A, CDKN1B (p27 Kip1), CDKN2a, CDKN2B, CD44, CSPG2, DAPK1, EGFR, EYA4, GSTP1, GTBP/MSH6, HIC-1, HRAS, IGF2, LKB1, MGMT, MLH1, MNCA9, MSH3, MYC, N33, PAX6, PGR, PTEN, RARB, SFN, S100A2, TGFBR2, TIMP3, TP53, TP73, VHL, CDKN1C, CAV1, CDH13, DRG1, PTGS2, THBS1, TPEF (=TMEFF2; =HPP1), DNMT1, CEA, MB, PCNA, CDC2, ESR1, CASP8, RASSF1, MSH4, MSH5. These sequences are derived from the ensembl database (date 01.10.2001) (http://www.ensembl.org) and will be taken to include all minor variations of the sequence material which are currently unforeseen, for example, but not limited to, minor deletions and SNPs.

[0066] SEQ ID 133 to 388 exhibit the pretreated sequences of DNA derived from genes MDR1, APOC2, CACNA1G, EGR4, AR, RB1, GPIb beta, MYOD1, WT1, HLA-F, ELK1, APC, BCL2, CALCA, CDH1, CDKN1A, CDKN1B (p27 Kip1), CDKN2a, CDKN2B, CD44, CSPG2, DAPK1, EGFR, EYA4, GSTP1, GTBP/MSH6, HIC-1, HRAS, IGF2, LKB1, MGMT, MLH1, MNCA9, MSH3, MYC, N33, PAX6, PGR, PTEN, RARE, SFN, S100A2, TGFBR2, TIMP3, TP53, TP73, VHL, CDKN1C, CAV1, CDH13, DRG1, PTGS2, THBS1, TPEF (=TMEFF2; =HPP1), DNMT1, CEA, MB, PCNA, CDC2, ESR1, CASP8, RASSFI, MSH4, MSH5. These sequences will be taken to include all minor variations of the sequence material which are currently unforeseen, for example, but not limited to, minor deletions and SNPs.

[0067] SEQ ID NO: 389 to SEQ ID NO: 518 exhibit the sequences of primer oligonucleotides for the amplification of pretreated DNA according to Sequence ID NO: 133 to SEQ ID NO: 388.

[0068] SEQ ID NO: 65 to SEQ ID NO: 132 exhibit the sequences of oligomers which are useful for the analysis of CpG positions within genomic DNA according to SEQ ID NO: 1 to SEQ ID NO: 64.

[0069] SEQ ID NO: 519 to SEQ ID NO: 1030 exhibit the sequences of oligomers which are useful for the analysis of the methylation status of CpG positions within genomic DNA according to SEQ ID NO: 1 to SEQ ID NO: 64 after treatment of said genomic DNA with bisulfate.

[0070] SEQ ID NO: 895 to SEQ ID NO: 1030 exhibit the sequences of oligomers which are particularly useful for the analysis of CpG positions within genomic DNA according to SEQ ID NO: 1 to SEQ ID NO: 64, after treatment of said with bisulfate and are subject to a preferred embodiment of this invention.

### BRIEF DESCRIPTION OF THE DRAWINGS

[0071] FIG. 1: Differentiation between healthy colon tissue and adenoma or carcinoma colon tissue according to Example 2. The labels on the left side of the plot are gene and CpG identifiers, these can be cross referenced using Table 3 and Table 7. The labels on the right side of the figure give the significance (p-value, T-test) of the difference between the means of the two groups. Each row corresponds to a single CpG and each column to the methylation levels of one sample. CpGs are ordered according to their contribution to the differentiation between the two tissue types (A=healthy, B=non healthy) with increasing contribution from top to bottom. Black indicates total methylation at a given CpG position, white represents no methylation at the particular position, with degrees of methylation represented in grey, from light (low proportion of methylation) to dark (high proportion of methylation).

[0072] FIG. 2: Differentiation between healthy colon tissue and carcinoma colon tissue according to Example 2. The labels on the left side of the plot are gene and CpG identifiers, these can be cross referenced using Table 4 and Table 7. The labels on the right side of the figure give the significance (p-value, T-test) of the difference between the means of the two groups. Each row corresponds to a single CpG and each column to the methylation levels of one sample. CpGs are ordered according to their contribution to the differentiation between the two tissue types (A=healthy, B=carcinoma) with increasing contribution from top to bottom. Black indicates total methylation at a given CpG position, white represents no methylation at the particular position, with degrees of methylation represented in grey, from light (low proportion of methylation) to dark (high proportion of methylation).

[0073] FIG. 3: Differentiation between healthy colon tissue and adenoma colon tissue according to Example 2. The labels on the left side of the plot are gene and CpG identifiers, these can be cross referenced in Table 5 and Table 7. The labels on the right side give the significance (p-value, T-test) of the difference between the means of the two groups. Each row corresponds to a single CpG and each column to the methylation levels of one sample. CpGs are ordered according to their contribution to the distinction to the differential diagnosis between the two tissue types (A=healthy, B=adenoma) with increasing contribution from top to bottom.

[0074] Black indicates total methylation at a given CpG position, white represents no methylation at the particular position, with degrees of methylation represented in grey, from light (low proportion of methylation) to dark (high proportion of methylation). Due to formatting of the page only 40 CpGs are shown in this figure.

[0075] FIG. 4: Differentiation between carcinoma colon tissue and adenoma colon tissue according to Example 2. The labels on the left side of the plot are gene and CpG identifiers, these can be cross referenced in Table 6 and Table 7. The labels on the right side give the significance (p-value, T-test) of the difference between the means of the two groups. Each row corresponds to a single CpG and each column to the methylation levels of one sample. CpGs are ordered according to their contribution to the distinction to the differential diagnosis between the two tissue types (A=carcinoma, B=adenoma) with increasing contribution from top to bottom. Black indicates total methylation at a given CpG position, white represents no methylation at the particular position, with degrees of methylation represented in grey, from light (low proportion of methylation) to dark (high proportion of methylation).

### EXAMPLES 1 AND 2

### Digital Phenotype

[0076] In the following examples, multiplex PCR was carried out upon tissue samples originating from colon adenomas or colon carcinoma. Multiplex PCR was also carried out upon healthy colon tissue. Each sample was treated in the manner described below in Example 1 in order to deduce the methylation status of CpG positions, the CpG methylation information for each sample was collated and then used in an analysis, as detailed in Example 2. An alternative method for the analysis of CpG methylation status is described in Example 3.

### EXAMPLE 1

[0077] In the first step the genomic DNA was isolated from the cell samples using the Wizzard kit from (Promega).

[0078] The isolated genomic DNA from the samples are treated using a bisulfate solution (hydrogen sulfite, disulfite). The treatment is such that all non methylated cytosines within the sample are converted to thiamidine, conversely 5-methylated cytosines within the sample remain unmodified.

[0079] The treated nucleic acids were then amplified using multiplex PCRs, amplifying 8 fragments per reaction with Cy5 fluorescently labelled primers. PCR primers used are described in Table 1. PCR conditions were as follows.

### Reaction Solution:

[0080] 10 ng bisulfite treated DNA

### 3.5 mM MgCl2

[0081] 400 μM dNTPs
2 pmol each primer

### 1 U Hot Star Taq (Qiagen)

[0082] Forty cycles were carried out as follows. Denaturation at 95° C. for 15 min, followed by annealing at 55° C. for 45 sec., primer elongation at 65° C. for 2 min. A final elongation at 65° C. was carried out for 10 min.

[0083] All PCR products from each individual sample were then hybridised to glass slides carrying a pair of immobilised oligonucleotides for each CpG position under analysis. Each of these detection oligonucleotides was designed to hybridise to the bisulphite converted sequence around one CpG site which was either originally unmethylated (TG) or methylated (CG). See Table 2 for further details of all hybridisation oligonucleotides used (both informative and non-informative) Hybridisation conditions were selected to allow the detection of the single nucleotide differences between the TG and CG variants.

[0084] 5 μl volume of each multiplex PCR product was diluted in 10×Ssarc buffer (10×Ssarc:230 ml 20×SSC, 180 ml sodium lauroyl sarcosinate solution 20%, dilute to 1000 ml with dH20). The reaction mixture was then hybridised to the detection oligonucleotides as follows. Denaturation at 95° C., cooling down to 10° C., hybridisation at 42° C. overnight followed by washing with 10×Ssarc and dH20 at 42° C.

[0085] Fluorescent signals from each hybridised oligonucleotide were detected using genepix scanner and software. Ratios for the two signals (from the CG oligonucleotide and the TG oligonucleotide used to analyse each CpG position) were calculated based on comparison of intensity of the fluorescent signals.

### EXAMPLE 2

[0086] The data obtained according to Example 1 is then sorted into a ranked matrix (as shown in FIGS. 1 to 4) according to CpG methylation differences between the two classes of tissues, using an algorithm. The most significant CpG positions are at the bottom of the matrix with significance decreasing towards the top. Black indicates total methylation at a given CpG position, white represents no methylation at the particular position, with degrees of methylation represented in grey, from light (low proportion of methylation) to dark (high proportion of methylation). Each row represents one specific CpG position within a gene and each column shows the methylation profile for the different CpGs for one sample. On the left side a CpG and gene identifier is shown this may be cross referenced with the accompanying tables (Table 1 and 7) in order to ascertain the gene in question and the detection oligomer vised. On the right side p values for the individual CpG positions are shown. The p values are the probabilities that the observed distribution occurred by chance in the data set.

[0087] For selected distinctions, we trained a learning algorithm (support vector machine, SVM). The SVM (as discussed by F. Model, P. Adoijan, A. Olek, C. Piepenbrock, Feature selection for DNA methylation based cancer classification. Bioinformatics. 2001 June; 17 Suppl 1:S157-64) constructs an optimal discriminant between two classes of given training samples. In this case each sample is described by the methylation patterns (CG/TG ratios) at the investigated CpG sites. The SVM was trained on a subset of samples of each class, which were presented with the diagnosis attached. Independent test samples, which were not shown to the SVM before were then presented to evaluate, if the diagnosis can be predicted correctly based on the predictor created in the training round. This procedure was repeated several times using different partitions of the samples, a method called cross-validation. Please note that all rounds are performed without using any knowledge obtained in the previous runs. The number of correct classifications was averaged over all runs, which gives a good estimate of our test accuracy (percent of correct classified samples over all rounds).

### Healthy Colon Tissue Compared to Non Healthy Colon Tissue (Colon Adenoma and Colon Carcinoma) (FIG. 1)

[0088] FIG. 1 shows the differentiation of healthy tissue from non healthy tissue wherein the non healthy specimens are obtained from either colon adenoma or colon carcinoma tissue. The evaluation is carried out using informative CpG positions from 27 genes. Informative CpG positions are further described in Table 3.

### Healthy Colon Tissue Compared to Colon Carcinoma Tissue (FIG. 2)

[0089] FIG. 2 shows the differentiation of healthy tissue from carcinoma tissue using informative CpG positions from 15 genes. Informative CpG positions are further described in Table 4.

### Healthy Colon Tissue Compared to Colon Adenoma Tissue (FIG. 3)

[0090] FIG. 3 shows the differentiation of healthy tissue from adenoma tissue using informative CpG positions from 40 genes. Informative CpG positions are further described in Table 5.

### Colon Carcinoma Tissue Compared to Colon Adenoma Tissue (FIG. 4)

[0091] FIG. 4 shows the differentiation of carcinoma tissue from adenoma tissue using informative CpG positions from 2 genes. Informative CpG positions are further described in Table 6.

### EXAMPLE 3

### Identification of the Methylation Status of a CPG Site within the Gene CD44

[0092] A fragment of the bisulfate treated DNA of the gene CD44 (Seq ID NO: 20) was PCR amplified using primers GAAAGGAGAGGTTAAAGGTTG (Seq ID NO 429) and AACTCACTTAACTCCAATCCC (Seq ID NO 430). The resultant fragment (696 bp in length) contained an informative CpG at position 235. The amplificate DNA was digested with the restriction endonuclease Apa I, recognition site GGGCC. Hydrolysis by said endonuclease is blocked by methylation of the CpG at position 235 of the amplificate. The digest was used as a control.

[0093] Genomic DNA was isolated from sample using the DNA wizzard DNA isolation kit (Pro-mega). Each sample was digested using Apa I according to manufacturer's recommendations (New England Biolabs).

[0094] 10 ng of each genomic digest was then amplified using PCR primers GAAAGGAGAGGTTAAAGGTTG and AACTCACTTAACTCCAATCCC. The PCR reactions were performed using a thermocycler (Eppendorf GmbH) using 10 ng of DNA, 6 pmol of each primer, 200 μM of each dNTP, 1.5 mM MgCl2 and 1 U of HotstartTaq (Qiagen AG). The other conditions were as recommended by the Taq polymerase manufacturer. Using the above mentioned primers, gene fragments were amplified by PCR performing a first denaturation step for 14 min at 96° C., followed by 30-45 cycles (step 2: 60 sec at 96° C., step 3: 45 sec at 52° C., step 4: 75 sec at 72° C.) and a subsequent final elongation of 10 min at 72° C. The presence of PCR products was analysed by agarose gel electrophoresis.

[0095] PCR products were detectable with Apa I hydrolysed DNA isolated wherein the CpG position in question was up-methylated, when step 2 to step 4 of the cycle program were repeated 34, 37, 39, 42 and 45 fold. In contrast PCR products were only detectable with Apa I hydrolysed DNA isolated from down-methylated DNA (and control DNA) when step 2 to step 4 of the cycle program were repeated 42 and 45 fold. These results were incorporated into a CpG methylation matrix analysis as described in Example 2.

### Tables

TABLE 1
PCR primers and products

| | | | Amplificate |
|---|---|---|---|
| No: | Gene: | Primer: | Length: |
| 1 | MDR1 | TAAGTATGTTGAAGAAAGATTATTGTAG | 633 |
| | (SEQ ID NO: 1) | (SEQ ID NO: 389) | |
| | | TAAAAACTATCCCATAATAACTCCCAAC | |
| | | (SEQ ID NO: 390) | |
| 2 | APOC2 | ATGAGTAGAAGAGGTGATAT | 533 |
| | (SEQ ID NO: 2) | (SEQ ID NO: 391) | |
| | | CCCTAAATCCCTTTCTTACC | |
| | | (SEQ ID NO: 392) | |
| 3 | CACNA1G | GGGATTTAAGAGAAATTGAGGTA | 707 |
| | (SEQ ID NO: 3) | (SEQ ID NO: 393) | |
| | | AAACCCCAAACATCCTTTAT | |
| | | (SEQ ID NO: 394) | |
| 4 | EGR4 | AGGGGGATTGAGTGTTAAGT | 293 |
| | (SEQ ID NO: 4) | (SEQ ID NO: 395) | |
| | | CCCAAACATAAACACAAAAT | |
| | | (SEQ ID NO: 396) | |
| 5 | AR | GTAGTAGTAGTAGTAAGAGA | 460 |
| | (SEQ ID NO: 5) | (SEQ ID NO: 397) | |
| | | ACCCCCTAAATAATTATCCT | |
| | | (SEQ ID NO: 398) | |
| 6 | RB1 | TTTAAGTTTGTTTTTGTTTTGGT | 718 |
| | (SEQ ID NO: 6) | (SEQ ID NO: 399) | |
| | | TCCTACTCTAAATCCTCCTCAA | |
| | | (SEQ ID NO: 400) | |
| 7 | GPIb beta | GGTGATAGGAGAATAATGTTGG | 379 |
| | (SEQ ID NO: 7) | (SEQ ID NO: 401) | |
| | | TCTCCCAACTACAACCAAAC | |
| | | (SEQ ID NO: 402) | |
| 8 | MYOD1 | ATTAGGGGTATAGAGGAGTATTGA | 883 |
| | (SEQ ID NO: 8) | (SEQ ID NO: 403) | |
| | | CTTACAAACCCACAATAAACAA | |
| | | (SEQ ID NO: 404) | |
| 9 | WT1 | AAAGGGAAATTAAGTGTTGT | 747 |
| | (SEQ ID NO: 9) | (SEQ ID NO: 405) | |
| | | TAACTACCCTCAACTTCCC | |
| | | (SEQ ID NO: 406) | |
| 10 | HLA-F | TTGTTGTTTTTAGGGGTTTTGG | 946 |
| | (SEQ ID NO: 10) | (SEQ ID NO: 407) | |
| | | TCCTTCCCATTCTCCAAATATC | |
| | | (SEQ ID NO: 408) | |
| 11 | ELK1 | AAGTGTTTTAGTTTTTAATGGGTA | 966 |
| | (SEQ ID NO: 11) | (SEQ ID NO: 409) | |
| | | CAAACCCAAAACTCACCTAT | |
| | | (SEQ ID NO: 410) | |
| 12 | APC | TCAACTACCATCAACTTCCTTA | 491 |
| | (SEQ ID NO: 12) | (SEQ ID NO: 411) | |
| | | AATTTATTTTTAGTGTTGTAGTGGG | |
| | | (SEQ ID NO: 412) | |
| 13 | BCL2 | GTATTTTATGTTAAGGGGGAAA | 640 |
| | (SEQ ID NO: 13) | (SEQ ID NO: 413) | |
| | | AAAAACCACAATCCTCCC | |
| | | (SEQ ID NO: 414) | |
| 14 | CALCA | GTTTTGGAAGTATGAGGGTG | 614 |
| | (SEQ ID NO: 14) | (SEQ ID NO: 415) | |
| | | CCAAATTCTAAACCAATTTCC | |
| | | (SEQ ID NO: 416) | |
| 15 | CDH1 | GAGGTTGGGGTTAGAGGAT | 478 |
| | (SEQ ID NO: 15) | (SEQ ID NO: 417) | |
| | | CAAACTCACAAATACTTTACAATTC | |
| | | (SEQ ID NO: 418) | |
| 16 | CDKN1A | GGATTAGTGGGAATAGAGGTG | 408 |
| | (SEQ ID NO: 16) | (SEQ ID NO: 419) | |
| | | AAACCCAAACTCCTAACTACC | |
| | | (SEQ ID NO: 420) | |
| 17 | CDKN1B | GTGGGGAGGTAGTTGAAGA | 478 |
| | (p27? Kip1) | (SEQ ID NO: 421) | |
| | (SEQ ID NO: 17) | ATACACCCCTAACCCAAAAT | |
| | | (SEQ ID NO: 422) | |
| 18 | CDKN2a | TTGAAAATTAAGGGTTGAGG | 598 |
| | (SEQ ID NO: 18) | (SEQ ID NO: 423) | |
| | | CACCCTCTAATAACCAACCA | |
| | | (SEQ ID NO: 424) | |
| 19 | CDKN2a | GGGGTTGGTTGGTTATTAGA | 256 |
| | (SEQ ID NO: 18) | (SEQ ID NO: 425) | |
| | | AACCCTCTACCCACCTAAAT | |
| | | (SEQ ID NO: 426) | |
| 20 | CDKN2B | GGTTGGTTGAAGGAATAGAAAT | 708 |
| | (SEQ ID NO: 19) | (SEQ ID NO: 427) | |
| | | CCCACTAAACATACCCTTATTC | |
| | | (SEQ ID NO: 428) | |
| 21 | CD44 | GAAAGGAGAGGTTAAAGGTTG | 696 |
| | (SEQ ID NO: 20) | (SEQ ID NO: 429) | |
| | | AACTCACTTAACTCCAATCCC | |
| | | (SEQ ID NO: 430) | |
| 22 | CSPG2 | GGATAGGAGTTGGGATTAAGAT | 414 |
| | (SEQ ID NO: 21) | (SEQ ID NO: 431) | |
| | | AAATCTTTTTCAACACCAAAAT | |
| | | (SEQ ID NO: 432) | |
| 23 | DAPK1 | AACCCTTTCTTCAAATTACAAA | 348 |
| | (SEQ ID NO: 22) | (SEQ ID NO: 433) | |
| | | TGATTGGGTTTTAGGGAAATA | |
| | | (SEQ ID NO: 434) | |
| 24 | EGFR | GGGTTTGGTTGTAATATGGATT | 732 |
| | (SEQ ID NO: 23) | (SEQ ID NO: 435) | |
| | | CCCAACACTACCCCTCTAA | |
| | | (SEQ ID NO: 436) | |
| 25 | EYA4 | GGAAGAGGTGATTAAATGGAT | 226 |
| | (SEQ ID NO: 24) | (SEQ ID NO: 437) | |
| | | CCCAAAAATCAAACAACAA | |
| | | (SEQ ID NO: 438) | |
| 26 | GSTP1 | ATTTGGGAAAGAGGGAAAG | 300 |
| | (SEQ ID NO: 25) | (SEQ ID NO: 439) | |
| | | TAAAAACTCTAAACCCCATCC | |
| | | (SEQ ID NO: 440) | |
| 27 | GTBP/MSH6 | CCCTACCCACCAATATACC | 278 |
| | (SEQ ID NO: 26) | (SEQ ID NO: 441) | |
| | | AGATTTGGGGAAGAAGTTGTA | |
| | | (SEQ ID NO: 442) | |
| 28 | HIC-1 | TGGGTTGGAGAAGAAGTTTA | 280 |
| | (SEQ ID NO: 27) | (SEQ ID NO: 443) | |
| | | TCATATTTCCAAAAACACACC | |
| | | (SEQ ID NO: 444) | |
| 29 | HRAS | CTTATTCCCATCTAAACCCTATT | 331 |
| | (SEQ ID NO: 28) | (SEQ ID NO: 445) | |
| | | GTGGTTTTGTGAAGTTTTAGGT | |
| | | (SEQ ID NO: 446) | |
| 30 | IGF2 | CCCTTCCCCTTAACTAAACT | 364 |
| | (SEQ ID NO: 29) | (SEQ ID NO: 447) | |
| | | AATTTGGGTTAGGTTTGGA | |
| | | (SEQ ID NO: 448) | |
| 31 | LKB1 | TAAAAGAAGGATTTTTGATTGG | 528 |
| | (SEQ ID NO: 30) | (SEQ ID NO: 449) | |
| | | CATCTTATTTACCTCCCTCCC | |
| | | (SEQ ID NO: 450) | |
| 32 | MGMT | AAGGTTTTAGGGAAGAGTGTTT | 636 |
| | (SEQ ID NO: 31) | (SEQ ID NO: 451) | |
| | | ACCTTTTCCTATCACAAAAATAA | |
| | | (SEQ ID NO: 452) | |
| 33 | MLH1 | TAAGGGGAGAGGAGGAGTTT | 545 |
| | (SEQ ID NO: 32) | (SEQ ID NO: 453) | |
| | | ACCAATTCTCAATCATCTCTTT | |
| | | (SEQ ID NO: 454) | |
| 34 | MNCA9 | GGGAAGTAGGTTAGGGTTAGTT | 616 |
| | (SEQ ID NO: 33) | (SEQ ID NO: 455) | |
| | | AAATCCTCCTCTCCAAATAAAT | |
| | | (SEQ ID NO: 456) | |
| 35 | MSH3 | TGTTTGGGATTGGGTAGG | 211 |
| | (SEQ ID NO: 34) | (SEQ ID NO: 457) | |
| | | CATAACCTTTACCTATCTCCTCA | |
| | | (SEQ ID NO: 458) | |
| 36 | MYC | GAGAGGGAGTAAAAGAAAATGGT | 712 |
| | (SEQ ID NO: 35) | (SEQ ID NO: 459) | |
| | | CCAAATAAACAAAATAACCTCC | |
| | | (SEQ ID NO: 460) | |
| 37 | N33 | TTTTAGATTGAGGTTTTAGGGT | 497 |
| | (SEQ ID NO: 36) | (SEQ ID NO: 461) | |
| | | ATCCATTCTACCTCCTTTTTCT | |
| | | (SEQ ID NO: 462) | |
| 38 | PAX6 | GGAGGGGAGAGGGTTATG | 374 |
| | (SEQ ID NO: 37) | (SEQ ID NO: 463) | |
| | | TACTATACACACCCCAAAACAA | |
| | | (SEQ ID NO: 464) | |
| 39 | PGR | TTTGGGAATGGGTTGTAT | 369 |
| | (SEQ ID NO: 38) | (SEQ ID NO: 465) | |
| | | CTACCCTTAACCTCCATCCTA | |
| | | (SEQ ID NO: 466) | |
| 40 | PTEN | TTTTAGGTAGTTATATTGGGTATGTT | 346 |
| | (SEQ ID NO: 39) | (SEQ ID NO: 467) | |
| | | TCAACTCTCAAACTTCCATCA | |
| | | (SEQ ID NO: 468) | |
| 41 | RARB | TTGTTGGGAGTTTTTAAGTTTT | 353 |
| | (SEQ ID NO: 40) | (SEQ ID NO: 469) | |
| | | CAAATTCTCCTTCCAAATAAAT | |
| | | (SEQ ID NO: 470) | |
| 42 | SFN | GAAGAGAGGAGAGGGAGGTA | 489 |
| | (SEQ ID NO: 41) | (SEQ ID NO: 471) | |
| | | CTATCCAACAAACCCAACA | |
| | | (SEQ ID NO: 472) | |
| 43 | S100A2 | GTTTTTAAGTTGGAGAAGAGGA | 460 |
| | (SEQ ID NO: 42) | (SEQ ID NO: 473) | |
| | | ACCTATAAATCACAACCCACTC | |
| | | (SEQ ID NO: 474) | |
| 44 | TGFBR2 | GTAATTTGAAGAAAGTTGAGGG | 296 |
| | (SEQ ID NO: 43) | (SEQ ID NO: 475) | |
| | | CCAACAACTAAACAAAACCTCT | |
| | | (SEQ ID NO: 476) | |
| 45 | TIMP3 | TGAGAAAATTGTTGTTTGAAGT | 306 |
| | (SEQ ID NO: 44) | (SEQ ID NO: 477) | |
| | | CAAAATACCCTAAAAACCACTC | |
| | | (SEQ ID NO: 478) | |
| 46 | TP53 | GGAGTTGTATTGTTGGGAGA | 279 |
| | (SEQ ID NO: 45) | (SEQ ID NO: 479) | |
| | | TAAAACCCCAATTTTCACTAA | |
| | | (SEQ ID NO: 480) | |
| 47 | TP73 | AGTAAATAGTGGGTGAGTTATGAA | 607 |
| | (SEQ ID NO: 46) | (SEQ ID NO: 481) | |
| | | GAAAAACCTCTAAAAACTACTCTCC | |
| | | (SEQ ID NO: 482) | |
| 48 | VHL | TGTAAAATGAATAAAGTTAATGAGTG | 362 |
| | (SEQ ID NO: 47) | (SEQ ID NO: 483) | |
| | | TCCTAAATTCAAATAATCCTCCT | |
| | | (SEQ ID NO: 484) | |
| 49 | CDKN1C | GGGGAGGTAGATATTTGGATAA | 300 |
| | (SEQ ID NO: 48) | (SEQ ID NO: 485) | |
| | | AACTACACCATTTATATTCCCAC | |
| | | (SEQ ID NO: 486) | |
| 50 | CAV1 | GTTAGTATGTTTGGGGGTAAAT | 435 |
| | (SEQ ID NO: 49) | (SEQ ID NO: 487) | |
| | | ATAAATAACACCTTCCACCCTA | |
| | | (SEQ ID NO: 488) | |
| 51 | CDH13 | TTGTATTAGGTTGGAAGTGGT | 286 |
| | (SEQ ID NO: 50) | (SEQ ID NO: 489) | |
| | | CCCAAATAAATCAACAACAACA | |
| | | (SEQ ID NO: 490) | |
| 52 | DRG1 | GGTTTTGGGTTTAGTGGTAAAT | 416 |
| | (SEQ ID NO: 51) | (SEQ ID NO: 491) | |
| | | AACTTTCATAACTCACCCTTTC | |
| | | (SEQ ID NO: 492) | |
| 53 | PTGS2 | GATTTTTGGAGAGGAAGTTAAG | 381 |
| | (SEQ ID NO: 52) | (SEQ ID NO: 493) | |
| | | AAAACTAAAAACCAAACCCATA | |
| | | (SEQ ID NO: 494) | |
| 54 | THBS1 | TGGGGTTAGTTTAGGATAGG | 398 |
| | (SEQ ID NO: 53) | (SEQ ID NO: 495) | |
| | | CTTAAAAACACTAAAACTTCTCAAA | |
| | | (SEQ ID NO: 496) | |
| 55 | TPEF | TTGTTTGGGTTAATAAATGGA | 295 |
| | (= TMEFF2; = HPP1) | (SEQ ID NO: 497) | |
| | (SEQ ID NO: 54) | CTTCTCTCTTCTCCCCTCTC | |
| | | (SEQ ID NO: 498) | |
| 56 | DNMT1 | TCCCCATCACACCTAAAA | 210 |
| | (SEQ ID NO: 55) | (SEQ ID NO: 499) | |
| | | GGGAGGAGGGGATGTATT | |
| | | (SEQ ID NO: 500) | |
| 57 | CEA | TATGGGAGGAGGTTAGTAAGTG | 680 |
| | (SEQ ID NO: 56) | (SEQ ID NO: 501) | |
| | | CCCCAAATCCTACATATAAAAA | |
| | | (SEQ ID NO: 502) | |
| 58 | MB | GTTTTTGGTAAAGGGGTAGAA | 598 |
| | (SEQ ID NO: 57) | (SEQ ID NO: 503) | |
| | | CCTAAAATATCAACCTCCACCT | |
| | | (SEQ ID NO: 504) | |
| 59 | PCNA | TTTTTAGGTTGTAAGGAGGTTTT | 608 |
| | (SEQ ID NO: 58) | (SEQ ID NO: 505) | |
| | | TAAATACCTCCAACACCTTTCT | |
| | | (SEQ ID NO: 506) | |
| 60 | CDC2 | ATTAGAAGTGAAAGTAATGGAATTT | 418 |
| | (SEQ ID NO: 59) | (SEQ ID NO: 507) | |
| | | TCAATTTCCAAAAACCAAC | |
| | | (SEQ ID NO: 508) | |
| 61 | ESR1 | AGGGGGAATTAAATAGAAAGAG | 662 |
| | (SEQ ID NO: 60) | (SEQ ID NO: 509) | |
| | | CAATAAAACCATCCCAAATACT | |
| | | (SEQ ID NO: 510) | |
| 62 | CASP8 | AGTGGATTTGGAGTTTAGATGT | 431 |
| | (SEQ ID NO: 61) | (SEQ ID NO: 511) | |
| | | AACAAAATAAAAACTTCTCCCA | |
| | | (SEQ ID NO: 512) | |
| 63 | RASSF1 | ACCTCTCTACAAATTACAAATTCA | 347 |
| | (SEQ ID NO: 62) | (SEQ ID NO: 513) | |
| | | AGTTTGGGTTAGTTTGGGTT | |
| | | (SEQ ID NO: 514) | |
| 64 | MSH4 | AGGATGTTGAGGTTTGAGATT | 339 |
| | (SEQ ID NO: 63) | (SEQ ID NO: 515) | |
| | | CACTATAATAACCACCACCCA | |
| | | (SEQ ID NO: 516) | |
| 65 | MSHS | TATTAGGAATAAAGTTGGGGAG | 395 |
| | (SEQ ID NO: 64) | (SEQ ID NO: 517) | |
| | | AACCCTTCAAACAAAAATAAAA | |
| | | (SEQ ID NO: 518) | |

TABLE 2
Hybridisation oligonucleotides

| No: | Gene | Oligo: |
|---|---|---|
| 1 | MDR1 | TTGGTGGTCGTTTTAAGG |
| | (SEQ ID NO: 1) | (SEQ ID NO: 519) |
| 2 | MDR1 | TTGGTGGTTGTTTTAAGG |
| | (SEQ ID NO: 1) | (SEQ ID NO: 520) |
| 3 | MDR1 | TTGAAAGACGTGTTTATA |
| | (SEQ ID NO: 1) | (SEQ ID NO: 521) |
| 4 | MDR1 | TTGAAAGATGTGTTTATA |
| | (SEQ ID NO: 1) | (SEQ ID NO: 522) |
| 5 | MDR1 | AGGTGTAACGGAAGTTAG |
| | (SEQ ID NO: 1) | (SEQ ID NO: 523) |
| 6 | MDR1 | AGGTGTAATGGAAGTTAG |
| | (SEQ ID NO: 1) | (SEQ ID NO: 524) |
| 7 | MDR1 | TAGTTTTTCGAGGAATTA |
| | (SEQ ID NO: 1) | (SEQ ID NO: 525) |
| 8 | MDR1 | TAGTTTTTTGAGGAATTA |
| | (SEQ ID NO: 1) | (SEQ ID NO: 526) |
| 9 | APOC2 | GAGAGTTTCGTTTTTGTT |
| | (SEQ ID NO: 2) | (SEQ ID NO: 527) |
| 10 | APOC2 | GAGAGTTTTGTTTTTGTT |
| | (SEQ ID NO: 2) | (SEQ ID NO: 528) |
| 11 | APOC2 | TTGGGGGACGTTATTGTT |
| | (SEQ ID NO: 2) | (SEQ ID NO: 529) |
| 12 | APOC2 | TTGGGGGATGTTATTGTT |
| | (SEQ ID NO: 2) | (SEQ ID NO: 530) |
| 13 | APOC2 | TGTGTTCGTTCGGAGTTG |
| | (SEQ ID NO: 2) | (SEQ ID NO: 531) |
| 14 | APOC2 | TGTGTTTGTTTGGAGTTG |
| | (SEQ ID NO: 2) | (SEQ ID NO: 532) |
| 15 | APOC2 | TGGGTTTGCGGAGAATGG |
| | (SEQ ID NO: 2) | (SEQ ID NO: 533) |
| 16 | APOC2 | TGGGTTTGTGGAGAATGG |
| | (SEQ ID NO: 2) | (SEQ ID NO: 534) |
| 17 | CACNA1G | TTTAGGAGCGTTAATGTG |
| | (SEQ ID NO: 3) | (SEQ ID NO: 535) |
| 18 | CACNA1G | TTTAGGAGTGTTAATGTG |
| | (SEQ ID NO: 3) | (SEQ ID NO: 536) |
| 19 | CACNA1G | TAGGGTTACGAGGTTAGG |
| | (SEQ ID NO: 3) | (SEQ ID NO: 537) |
| 20 | CACNA1G | TAGGGTTATGAGGTTAGG |
| | (SEQ ID NO: 3) | (SEQ ID NO: 538) |
| 21 | CACNA1G | GGAGGTTACGTTTAGATT |
| | (SEQ ID NO: 3) | (SEQ ID NO: 539) |
| 22 | CACNA1G | GGAGGTTATGTTTAGATT |
| | (SEQ ID NO: 3) | (SEQ ID NO: 540) |
| 23 | CACNA1G | TTAGGGGTCGTGGATAAA |
| | (SEQ ID NO: 3) | (SEQ ID NO: 541) |
| 24 | CACNA1G | TTAGGGGTTGTGGATAAA |
| | (SEQ ID NO: 3) | (SEQ ID NO: 542) |
| 25 | EGR4 | GGTGGGAAGCGTATTTAT |
| | (SEQ ID NO: 4) | (SEQ ID NO: 543) |
| 26 | EGR4 | GGTGGGAAGTGTATTTAT |
| | (SEQ ID NO: 4) | (SEQ ID NO: 544) |
| 27 | EGR4 | TTATAGTTCGAGTTTTTT |
| | (SEQ ID NO: 4) | (SEQ ID NO: 545) |
| 28 | EGR4 | TTATAGTTTGAGTTTTTT |
| | (SEQ ID NO: 4) | (SEQ ID NO: 546) |
| 29 | EGR4 | GGAGTTTTCGGTATATAT |
| | (SEQ ID NO: 4) | (SEQ ID NO: 927) |
| 30 | EGR4 | GGAGTTTTTGGTATATAT |
| | (SEQ ID NO: 4) | (SEQ ID NO: 928) |
| 31 | AR | TGTTATTTCGAGAGAGGT |
| | (SEQ ID NO: 5) | (SEQ ID NO: 547) |
| 32 | AR | TGTTATTTTGAGAGAGGT |
| | (SEQ ID NO: 5) | (SEQ ID NO: 548) |
| 33 | AR | AGAGGTTGCGTTTTAGAG |
| | (SEQ ID NO: 5) | (SEQ ID NO: 1027) |
| 34 | AR | AGAGGTTGTGTTTTAGAG |
| | (SEQ ID NO: 5) | (SEQ ID NO: 1028) |
| 35 | AR | ATTTTGAGCGAGGTTAGT |
| | (SEQ ID NO: 5) | (SEQ ID NO: 549) |
| 36 | AR | ATTTTGAGTGAGGTTAGT |
| | (SEQ ID NO: 5) | (SEQ ID NO: 550) |
| 37 | AR | GTAGTATTCGAAGGTAGT |
| | (SEQ ID NO: 5) | (SEQ ID NO: 551) |
| 38 | AR | GTAGTATTTGAAGGTAGT |
| | (SEQ ID NO: 5) | (SEQ ID NO: 552) |
| 39 | RB1 | TTAGATTTCGGGATAGGG |
| | (SEQ ID NO: 6) | (SEQ ID NO: 553) |
| 40 | RB1 | TTAGATTTTGGGATAGGG |
| | (SEQ ID NO: 6) | (SEQ ID NO: 554) |
| 41 | RB1 | TATAGTTTCGTTAAGTGT |
| | (SEQ ID NO: 6) | (SEQ ID NO: 555) |
| 42 | RB1 | TATAGTTTTGTTAAGTGT |
| | (SEQ ID NO: 6) | (SEQ ID NO: 556) |
| 43 | RB1 | GTGTATTTCGGTTTGGAG |
| | (SEQ ID NO: 6) | (SEQ ID NO: 557) |
| 44 | RB1 | GTGTATTTTGGTTTGGAG |
| | (SEQ ID NO: 6) | (SEQ ID NO: 558) |
| 45 | RB1 | TGGATTTACGTTAGGTTT |
| | (SEQ ID NO: 6) | (SEQ ID NO: 559) |
| 46 | RB1 | TGGATTTATGTTAGGTTT |
| | (SEQ ID NO: 6) | (SEQ ID NO: 560) |
| 47 | GPIb beta | TGTTATTTGTCGTTGTAG |
| | (SEQ ID NO: 7) | (SEQ ID NO: 561) |
| 48 | GPIb beta | TGTTATTTGTTGTTGTAG |
| | (SEQ ID NO: 7) | (SEQ ID NO: 562) |
| 49 | GPIb beta | GTGGGAGCGGAAGTTTGA |
| | (SEQ ID NO: 7) | (SEQ ID NO: 563) |
| 50 | GPIb beta | GTGGGAGTGGAAGTTTGA |
| | (SEQ ID NO: 7) | (SEQ ID NO: 564) |
| 51 | GPIb beta | TAGAGTAAGTCGGGTTGT |
| | (SEQ ID NO: 7) | (SEQ ID NO: 565) |
| 52 | GPIb beta | TAGAGTAAGTCGGGTTGTT |
| | (SEQ ID NO: 7) | (SEQ ID NO: 566) |
| 53 | GPIb beta | GGTTAGGTCGTAGTATTG |
| | (SEQ ID NO: 7) | (SEQ ID NO: 567) |
| 54 | GPIb beta | GGTTAGGTTGTAGTATTG |
| | (SEQ ID NO: 7) | (SEQ ID NO: 568) |
| 55 | GPIb beta | GGAGTTCGGTCGGGTTTT |
| | (SEQ ID NO: 7) | (SEQ ID NO: 1005) |
| 56 | GPIb beta | GGAGTTTGGTTGGGTTTT |
| | (SEQ ID NO: 7) | (SEQ ID NO: 1006) |
| 57 | MYOD1 | ATAGTAGTCGGGTGTTGG |
| | (SEQ ID NO: 8) | (SEQ ID NO: 569) |
| 58 | MYOD1 | ATAGTAGTTGGGTGTTGG |
| | (SEQ ID NO: 8) | (SEQ ID NO: 570) |
| 59 | MYOD1 | GTGTTAGTCGTTTAGGGT |
| | (SEQ ID NO: 8) | (SEQ ID NO: 1009) |
| 60 | MYOD1 | GTGTTAGTTGTTTAGGGT |
| | (SEQ ID NO: 8) | (SEQ ID NO: 1010) |
| 61 | MYOD1 | TAGTTGTTCGTTTGGGTT |
| | (SEQ ID NO: 8) | (SEQ ID NO: 571) |
| 62 | MYOD1 | TAGTTGTTTGTTTGGGTT |
| | (SEQ ID NO: 8) | (SEQ ID NO: 572) |
| 63 | MYOD1 | AATTAGGTCGGATAGGAG |
| | (SEQ ID NO: 8) | (SEQ ID NO: 975) |
| 64 | MYOD1 | AATTAGGTTGGATAGGAG |
| | (SEQ ID NO: 8) | (SEQ ID NO: 976) |
| 65 | WT1 | TAGTGAGACGAGGTTTTT |
| | (SEQ ID NO: 9) | (SEQ ID NO: 1017) |
| 66 | WT1 | TAGTGAGATGAGGTTTTT |
| | (SEQ ID NO: 9) | (SEQ ID NO: 1018) |
| 67 | WT1 | TATATTGGCGAAGGTTAA |
| | (SEQ ID NO: 9) | (SEQ ID NO: 967) |
| 68 | WT1 | TATATTGGTGAAGGTTAA |
| | (SEQ ID NO: 9) | (SEQ ID NO: 968) |
| 69 | WT1 | TGTTATATCGGTTAGTTG |
| | (SEQ ID NO: 9) | (SEQ ID NO: 959) |
| 70 | WT1 | TGTTATATTGGTTAGTTG |
| | (SEQ ID NO: 9) | (SEQ ID NO: 960) |
| 71 | WT1 | TTTAGTTTCGATTTTTGG |
| | (SEQ ID NO: 9) | (SEQ ID NO: 573) |
| 72 | WT1 | TTTAGTTTTGATTTTTGG |
| | (SEQ ID NO: 9) | (SEQ ID NO: 574) |
| 73 | HLA-F | ATAGGGTACGTTAAGGTT |
| | (SEQ ID NO: 10) | (SEQ ID NO: 575) |
| 74 | HLA-F | ATAGGGTATGTTAAGGTT |
| | (SEQ ID NO: 10) | (SEQ ID NO: 576) |
| 75 | HLA-F | TATTTGGGCGGGTGAGTG |
| | (SEQ ID NO: 10) | (SEQ ID NO: 939) |
| 76 | HLA-F | TATTTGGGTGGGTGAGTG |
| | (SEQ ID NO: 10) | (SEQ ID NO: 940) |
| 77 | HLA-F | GAGAGAAACGGTTTTTGT |
| | (SEQ ID NO: 10) | (SEQ ID NO: 577) |
| 78 | HLA-F | GAGAGAAATGGTTTTTGT |
| | (SEQ ID NO: 10) | (SEQ ID NO: 578) |
| 79 | HLA-F | AGTTGTTTCGTAGATATT |
| | (SEQ ID NO: 10) | (SEQ ID NO: 989) |
| 80 | HLA-F | AGTTGTTTTGTAGATATT |
| | (SEQ ID NO: 10) | (SEQ ID NO: 990) |
| 81 | ELK1 | TGTTTAATCGTAGAGTTG |
| | (SEQ ID NO: 11) | (SEQ ID NO: 579) |
| 82 | ELK1 | TGTTTAATTGTAGAGTTG |
| | (SEQ ID NO: 11) | (SEQ ID NO: 580) |
| 83 | ELK1 | TTTGTTTTCGTTGAGTAG |
| | (SEQ ID NO: 11) | (SEQ ID NO: 581) |
| 84 | ELK1 | TTTGTTTTTGTTGAGTAG |
| | (SEQ ID NO: 11) | (SEQ ID NO: 582) |
| 85 | ELK1 | GAAGGGTTCGTTTTTTAA |
| | (SEQ ID NO: 11) | (SEQ ID NO: 583) |
| 86 | ELK1 | GAAGGGTTTGTTTTTTAA |
| | (SEQ ID NO: 11) | (SEQ ID NO: 584) |
| 87 | ELK1 | ATTAATAGCGTTTTGGTT |
| | (SEQ ID NO: 11) | (SEQ ID NO: 585) |
| 88 | ELK1 | ATTAATAGTGTTTTGGTT |
| | (SEQ ID NO: 11) | (SEQ ID NO: 586) |
| 89 | APC | TTTAATCGTATAGTTTGT |
| | (SEQ ID NO: 12) | (SEQ ID NO: 971) |
| 90 | APC | TTTAATTGTATAGTTTGT |
| | (SEQ ID NO: 12) | (SEQ ID NO: 972) |
| 91 | APC | TATTTAGCGGATTATATA |
| | (SEQ ID NO: 12) | (SEQ ID NO: 587) |
| 92 | APC | TATTTAGTGGATTATATA |
| | (SEQ ID NO: 12) | (SEQ ID NO: 588) |
| 93 | APC | TATTTTGGCGGGTTGTAT |
| | (SEQ ID NO: 12) | (SEQ ID NO: 985) |
| 94 | APC | TATTTTGGTGGGTTGTAT |
| | (SEQ ID NO: 12) | (SEQ ID NO: 986) |
| 95 | APC | AAGGTTATCGGTTTAAGA |
| | (SEQ ID NO: 12) | (SEQ ID NO: 589) |
| 96 | APC | AAGGTTATTGGTTTAAGA |
| | (SEQ ID NO: 12) | (SEQ ID NO: 590) |
| 97 | APC | GGGGGACGACGTTTTTGT |
| | (SEQ ID NO: 12) | (SEQ ID NO: 591) |
| 98 | APC | GGGGGATGATGTTTTTGT |
| | (SEQ ID NO: 12) | (SEQ ID NO: 592) |
| 99 | BCL2 | AGTGTTTCGCGTGATTGA |
| | (SEQ ID NO: 13) | (SEQ ID NO: 593) |
| 100 | BCL2 | AGTGTTTCGCGTGATTGA |
| | (SEQ ID NO: 13) | (SEQ ID NO: 594) |
| 101 | BCL2 | TAAGTTGTCGTAGAGGGG |
| | (SEQ ID NO: 13) | (SEQ ID NO: 595) |
| 102 | BCL2 | TAAGTTGTTGTAGAGGGG |
| | (SEQ ID NO: 13) | (SEQ ID NO: 596) |
| 103 | BCL2 | GGATTTCGTCGTTGTAGA |
| | (SEQ ID NO: 13) | (SEQ ID NO: 597) |
| 104 | BCL2 | GGATTTTGTTGTTGTAGA |
| | (SEQ ID NO: 13) | (SEQ ID NO: 598) |
| 105 | BCL2 | TTTTGTTACGGTGGTGGA |
| | (SEQ ID NO: 13) | (SEQ ID NO: 1025) |
| 106 | BCL2 | TTTTGTTATGGTGGTGGA |
| | (SEQ ID NO: 13) | (SEQ ID NO: 1026) |
| 107 | CALCA | GAGGGTGACGTAATTTAG |
| | (SEQ ID NO: 14) | (SEQ ID NO: 599) |
| 108 | CALCA | GAGGGTGATGTAATTTAG |
| | (SEQ ID NO: 14) | (SEQ ID NO: 600) |
| 109 | CALCA | TGTATTGGCGGAATTTTT |
| | (SEQ ID NO: 14) | (SEQ ID NO: 601) |
| 110 | CALCA | TGTATTGGTGGAATTTTT |
| | (SEQ ID NO: 14) | (SEQ ID NO: 602) |
| 111 | CALCA | ATTAGGTTCGTGTTTTAG |
| | (SEQ ID NO: 14) | (SEQ ID NO: 953) |
| 112 | CALCA | ATTAGGTTTGTGTTTTAG |
| | (SEQ ID NO: 14) | (SEQ ID NO: 954) |
| 113 | CALCA | GTTAGTTTCGGGATATTT |
| | (SEQ ID NO: 14) | (SEQ ID NO: 603) |
| 114 | CALCA | GTTAGTTTTGGGATATTT |
| | (SEQ ID NO: 14) | (SEQ ID NO: 604) |
| 115 | CDH1 | TAGAGGATCGTTTGAGTT |
| | (SEQ ID NO: 15) | (SEQ ID NO: 605) |
| 116 | CDH1 | TAGAGGATTGTTTGAGTT |
| | (SEQ ID NO: 15) | (SEQ ID NO: 606) |
| 117 | CDH1 | GTTGTGATCGTATTATTG |
| | (SEQ ID NO: 15) | (SEQ ID NO: 607) |
| 118 | CDH1 | GTTGTGATTGTATTATTG |
| | (SEQ ID NO: 15) | (SEQ ID NO: 608) |
| 119 | CDH1 | TTGGGATTCGAATTTAGT |
| | (SEQ ID NO: 15) | (SEQ ID NO: 609) |
| 120 | CDH1 | TTGGGATTTGAATTTAGT |
| | (SEQ ID NO: 15) | (SEQ ID NO: 610) |
| 121 | CDH1 | AGGGTTATCGCGTTTATG |
| | (SEQ ID NO: 15) | (SEQ ID NO: 983) |
| 122 | CDH1 | AGGGTTATTGTGTTTATG |
| | (SEQ ID NO: 15) | (SEQ ID NO: 984) |
| 123 | CDH1 | TAGTGGCGTCGGAATTGT |
| | (SEQ ID NO: 15) | (SEQ ID NO: 929) |
| 124 | CDH1 | TAGTGGTGTTGGAATTGT |
| | (SEQ ID NO: 15) | (SEQ ID NO: 930) |
| 125 | CDKN1A | AGGTGTATCGTTTTTATA |
| | (SEQ ID NO: 16) | (SEQ ID NO: 611) |
| 126 | CDKN1A | AGGTGTATTGTTTTTATA |
| | (SEQ ID NO: 16) | (SEQ ID NO: 612) |
| 127 | CDKN1A | TGGGTTAGCGGTGAGTTA |
| | (SEQ ID NO: 16) | (SEQ ID NO: 613) |
| 128 | CDKN1A | TGGGTTAGTGGTGAGTTA |
| | (SEQ ID NO: 16) | (SEQ ID NO: 614) |
| 129 | CDKN1A | GTTTATTTCGTGGGGAAA |
| | (SEQ ID NO: 16) | (SEQ ID NO: 615) |
| 130 | CDKN1A | GTTTATTTTGTGGGGAAA |
| | (SEQ ID NO: 16) | (SEQ ID NO: 616) |
| 131 | CDKN1A | TTGGAATTCGGTTAGGTT |
| | (SEQ ID NO: 16) | (SEQ ID NO: 617) |
| 132 | CDKN1A | TTGGAATTTGGTTAGGTT |
| | (SEQ ID NO: 16) | (SEQ ID NO: 618) |
| 133 | CDKN1B | AAGAGAAACGTTGGAATA |
| | (p27 Kip1) | (SEQ ID NO: 619) |
| | (SEQ ID NO: 17) | |
| 134 | CDKN1B | AAGAGAAATGTTGGAATA |
| | (p27 Kip1) | (SEQ ID NO: 620) |
| | (SEQ ID NO: 17) | |
| 135 | CDKN1B | TTTGATTTCGAGGGGAGT |
| | (p27 Kip1) | (SEQ ID NO: 621) |
| | (SEQ ID NO: 17) | |
| 136 | CDKN1B | TTTGATTTTGAGGGGAGT |
| | (p27 Kip1) | (SEQ ID NO: 622) |
| | (SEQ ID NO: 17) | |
| 137 | CDKN1B | GTATTTGGCGGTTGGATT |
| | (p27 Kip1) | (SEQ ID NO: 623) |
| | (SEQ ID NO: 17) | |
| 138 | CDKN1B | GTATTTGGTGGTTGGATT |
| | (p27 Kip1) | (SEQ ID NO: 624) |
| | (SEQ ID NO: 17) | |
| 139 | CDKN1B | TATAATTTCGGGAAAGAA |
| | (p27 Kip1) | (SEQ ID NO: 625) |
| | (SEQ ID NO: 17) | |
| 140 | CDKN1B | TATAATTTTGGGAAAGAA |
| | (p27 Kip1) | (SEQ ID NO: 626) |
| | (SEQ ID NO: 17) | |
| 141 | CDKN2a | AGAGTGAACGTATTTAAA |
| | (SEQ ID NO: 18) | (SEQ ID NO: 627) |
| 142 | CDKN2a | AGAGTGAATGTATTTAAA |
| | (SEQ ID NO: 18) | (SEQ ID NO: 628) |
| 143 | CDKN2a | GTTGTTTTCGGTTGGTGT |
| | (SEQ ID NO: 18) | (SEQ ID NO: 1029) |
| 144 | CDKN2a | GTTGTTTTTGGTTGGTGT |
| | (SEQ ID NO: 18) | (SEQ ID NO: 1030) |
| 145 | CDKN2a | GATAGGGTCGGAGGGGGT |
| | (SEQ ID NO: 18) | (SEQ ID NO: 629) |
| 146 | CDKN2a | GATAGGGTTGGAGGGGGT |
| | (SEQ ID NO: 18) | (SEQ ID NO: 630) |
| 147 | CDKN2a | GGAGTTTTCGGTTGATTG |
| | (SEQ ID NO: 18) | (SEQ ID NO: 997) |
| 148 | CDKN2a | GGAGTTTTTGGTTGATTG |
| | (SEQ ID NO: 18) | (SEQ ID NO: 998) |
| 149 | CDKN2a | AATAGTTACGGTCGGAGG |
| | (SEQ ID NO: 18) | (SEQ ID NO: 981) |
| 150 | CDKN2a | AATAGTTATGGTTGGAGG |
| | (SEQ ID NO: 18) | (SEQ ID NO: 982) |
| 151 | CDKN2B | ATATTTAGCGAGTAGTGT |
| | (SEQ ID NO: 19) | (SEQ ID NO: 631) |
| 152 | CDKN2B | ATATTTAGTGAGTAGTGT |
| | (SEQ ID NO: 19) | (SEQ ID NO: 632) |
| 153 | CDKN2B | ATAGGGGGCGGAGTTTAA |
| | (SEQ ID NO: 19) | (SEQ ID NO: 633) |
| 154 | CDKN2B | ATAGGGGGTGGAGTTTAA |
| | (SEQ ID NO: 19) | (SEQ ID NO: 634) |
| 155 | CDKN2B | TTATTGTACGGGGTTTTA |
| | (SEQ ID NO: 19) | (SEQ ID NO: 635) |
| 156 | CDKN2B | TTATTGTATGGGGTTTTA |
| | (SEQ ID NO: 19) | (SEQ ID NO: 636) |
| 157 | CDKN2B | TTTTAAGTCGTAGAAGGA |
| | (SEQ ID NO: 19) | (SEQ ID NO: 637) |
| 158 | CDKN2B | TTTTAAGTTGTAGAAGGA |
| | (SEQ ID NO: 19) | (SEQ ID NO: 638) |
| 159 | CD44 | GTGGGGTTCGGAGGTATA |
| | (SEQ ID NO: 20) | (SEQ ID NO: 919) |
| 160 | CD44 | GTGGGGTTCGGAGGTATA |
| | (SEQ ID NO: 20) | (SEQ ID NO: 920) |
| 161 | CD44 | GGTAGTTTCGATTATTTA |
| | (SEQ ID NO: 20) | (SEQ ID NO: 639) |
| 162 | CD44 | GGTAGTTTCGATTATTTA |
| | (SEQ ID NO: 20) | (SEQ ID NO: 640) |
| 163 | CD44 | TTGTTTAGCGGATTTTAG |
| | (SEQ ID NO: 20) | (SEQ ID NO: 897) |
| 164 | CD44 | TCGTTTAGTGGATTTTAG |
| | (SEQ ID NO: 20) | (SEQ ID NO: 898) |
| 165 | CD44 | TGGTGGTACGTAGTTTGG |
| | (SEQ ID NO: 20) | (SEQ ID NO: 641) |
| 166 | CD44 | TGGTGGTATGTAGTTTGG |
| | (SEQ ID NO: 20) | (SEQ ID NO: 642) |
| 167 | CSPG2 | AAGATTTTCGGTTAGTTT |
| | (SEQ ID NO: 21) | (SEQ ID NO: 963) |
| 168 | CSPG2 | AAGATTTTTGGTTAGTTT |
| | (SEQ ID NO: 21) | (SEQ ID NO: 964) |
| 169 | CSPG2 | ATGTGATTCGTTTGGGTA |
| | (SEQ ID NO: 21) | (SEQ ID NO: 643) |
| 170 | CSPG2 | ATGTGATTCGTTTGGGTA |
| | (SEQ ID NO: 21) | (SEQ ID NO: 644) |
| 171 | CSPG2 | GGGTAACGTCGAATTCAG |
| | (SEQ ID NO: 21) | (SEQ ID NO: 901) |
| 172 | CSPG2 | GGGTAATGTTGAATTTAG |
| | (SEQ ID NO: 21) | (SEQ ID NO: 902) |
| 173 | CSPG2 | AAAAATTCGCGAGTCTAG |
| | (SEQ ID NO: 21) | (SEQ ID NO: 945) |
| 174 | CSPG2 | AAAAATTTGTGAGTTCAG |
| | (SEQ ID NO: 21) | (SEQ ID NO: 946) |
| 175 | DAPK1 | GTTGGAGTCGAGGTTCGA |
| | (SEQ ID NO: 22) | (SEQ ID NO: 645) |
| 176 | DAPK1 | GTTGGAGTCGAGGTTCGA |
| | (SEQ ID NO: 22) | (SEQ ID NO: 646) |
| 177 | DAPK1 | TTTTCTGTCGGATTGGTG |
| | (SEQ ID NO: 22) | (SEQ ID NO: 647) |
| 178 | DAPK1 | TTTTTCGTTGGATTGGTG |
| | (SEQ ID NO: 22) | (SEQ ID NO: 648) |
| 179 | DAPK1 | GAAGGGAGCGTATTTCAT |
| | (SEQ ID NO: 22) | (SEQ ID NO: 955) |
| 180 | DAPK1 | GAAGGGAGTGTATTTTAT |
| | (SEQ ID NO: 22) | (SEQ ID NO: 956) |
| 181 | DAPK1 | TTGTTTTTCGGAAATTTG |
| | (SEQ ID NO: 22) | (SEQ ID NO: 935) |
| 182 | DAPK1 | TTGTTTTTTGGAAATTTG |
| | (SEQ ID NO: 22) | (SEQ ID NO: 936) |
| 183 | EGFR | TTTGTATTCGGAGTTGGG |
| | (SEQ ID NO: 23) | (SEQ ID NO: 961) |
| 184 | EGFR | TTTGTATTTGGAGTTGGG |
| | (SEQ ID NO: 23) | (SEQ ID NO: 962) |
| 185 | EGFR | GATGATTTCGAGGGTGTT |
| | (SEQ ID NO: 23) | (SEQ ID NO: 649) |
| 186 | EGFR | GATGATTTTGAGGGTGTT |
| | (SEQ ID NO: 23) | (SEQ ID NO: 650) |
| 187 | EGFR | GAGGGTTTCGTAGTGTTG |
| | (SEQ ID NO: 23) | (SEQ ID NO: 651) |
| 188 | EGFR | GAGGGTTTTGTAGTGTTG |
| | (SEQ ID NO: 23) | (SEQ ID NO: 652) |
| 189 | EGFR | TGGGGATTCGAATAAAGG |
| | (SEQ ID NO: 23) | (SEQ ID NO: 653) |
| 190 | EGFR | TGGGGATTTGAATAAAGG |
| | (SEQ ID NO: 23) | (SEQ ID NO: 654) |
| 191 | EGFR | ATTTGGTTCGATTTGGAT |
| | (SEQ ID NO: 23) | (SEQ ID NO: 931) |
| 192 | EGFR | ATTTGGTTTGATTTGGAT |
| | (SEQ ID NO: 23) | (SEQ ID NO: 932) |
| 193 | EYA4 | TATATATACGTGTGGGTA |
| | (SEQ ID NO: 24) | (SEQ ID NO: 655) |
| 194 | EYA4 | TATATATATGTGTGGGTA |
| | (SEQ ID NO: 24) | (SEQ ID NO: 656) |
| 195 | EYA4 | AGTGTATGCGTAGAAGGT |
| | (SEQ ID NO: 24) | (SEQ ID NO: 923) |
| 196 | EYA4 | AGTGTATGTGTAGAAGGT |
| | (SEQ ID NO: 24) | (SEQ ID NO: 924) |
| 197 | EYA4 | TTTAGATACGAAATGTTA |
| | (SEQ ID NO: 24) | (SEQ ID NO: 657) |
| 198 | EYA4 | TTTAGATATGAAATGTTA |
| | (SEQ ID NO: 24) | (SEQ ID NO: 658) |
| 199 | EYA4 | AAGTAAGTCGTTGTTGTT |
| | (SEQ ID NO: 24) | (SEQ ID NO: 921) |
| 200 | EYA4 | AAGTAAGTTGTTGTTGTT |
| | (SEQ ID NO: 24) | (SEQ ID NO: 922) |
| 201 | GSTP1 | GGTTTTTTCGGTTAGTTG |
| | (SEQ ID NO: 25) | (SEQ ID NO: 659) |
| 202 | GSTP1 | GGTFTTITTGGTTAGTTG |
| | (SEQ ID NO: 25) | (SEQ ID NO: 660) |
| 203 | GSTP1 | GGAGTTCGCGGGATTFTT |
| | (SEQ ID NO: 25) | (SEQ ID NO: 905) |
| 204 | GSTP1 | GGAGTTTGTGGGATTTTT |
| | (SEQ ID NO: 25) | (SEQ ID NO: 906) |
| 205 | GSTP1 | GTAGTFTTCGTTATTAGT |
| | (SEQ ID NO: 25) | (SEQ ID NO: 661) |
| 206 | GSTP1 | GTAGTTFTTGITATTAGT |
| | (SEQ ID NO: 25) | (SEQ ID NO: 662) |
| 207 | GTBP/MSH6 | GAGGAATTCGGGTTTTAG |
| | (SEQ ID NO: 26) | (SEQ ID NO: 951) |
| 208 | GTBP/MSH6 | GAGGAATTTGGGTTTTAG |
| | (SEQ ID NO: 26) | (SEQ ID NO: 952) |
| 209 | GTBP/MSH6 | TTTGTTGGCGGGAAATTT |
| | (SEQ ID NO: 26) | (SEQ ID NO: 925) |
| 210 | GTBP/MSH6 | ITTUFTGGTGGGAAATIT |
| | (SEQ ID NO: 26) | (SEQ ID NO: 926) |
| 211 | GTBP/MSH6 | TTTTGTCGGACGGAGTTT |
| | (SEQ ID NO: 26) | (SEQ ID NO: 663) |
| 212 | GTBP/MSH6 | TTFTGTTGGATGGAGTFT |
| | (SEQ ID NO: 26) | (SEQ ID NO: 664) |
| 213 | GTBP/MSH6 | AAGGTTTAATCGTTTTGT |
| | (SEQ ID NO: 26) | (SEQ ID NO: 665) |
| 214 | GTBP/MSH6 | AAGGTTTAATTGTTTTGT |
| | (SEQ ID NO: 26) | (SEQ ID NO: 666) |
| 215 | HIC-1 | TTAAAACGGCGTATAGGG |
| | (SEQ ID NO: 27) | (SEQ ID NO: 667) |
| 216 | HIC-1 | TTAAAATGGTGTATAGGG |
| | (SEQ ID NO: 27) | (SEQ ID NO: 668) |
| 217 | HIC-1 | AGGAGATTCGAAAGTTTA |
| | (SEQ ID NO: 27) | (SEQ ID NO: 669) |
| 218 | HIC-1 | AGGAGATTTGAAAGTTTA |
| | (SEQ ID NO: 27) | (SEQ ID NO: 670) |
| 219 | HIC-1 | TTTTAGAGCGTTAGGGTT |
| | (SEQ ID NO: 27) | (SEQ ID NO: 1021) |
| 220 | HIC-1 | TTTTAGAGTGTTAGGGTT |
| | (SEQ ID NO: 27) | (SEQ ID NO: 1022) |
| 221 | HRAS | ATAGTGGGCGTAATTGGT |
| | (SEQ ID NO: 28) | (SEQ ID NO: 671) |
| 222 | HRAS | ATAGTGGGTGTAATTGGT |
| | (SEQ ID NO: 28) | (SEQ ID NO: 672) |
| 223 | HRAS | AAATTGGACGTTTAGTTG |
| | (SEQ ID NO: 28) | (SEQ ID NO: 673) |
| 224 | HRAS | AAATTGGATGTTTAGTTG |
| | (SEQ ID NO: 28) | (SEQ ID NO: 674) |
| 225 | HRAS | TAGAAGTCGAGAGATTTG |
| | (SEQ ID NO: 28) | (SEQ ID NO: 675) |
| 226 | HRAS | TAGAAGTTGAGAGATTTG |
| | (SEQ ID NO: 28) | (SEQ ID NO: 676) |
| 227 | HRAS | GAATATTTCGAAGTTTGT |
| | (SEQ ID NO: 28) | (SEQ ID NO: 677) |
| 228 | HRAS | GAATATTTTGAAGTTTGT |
| | (SEQ ID NO: 28) | (SEQ ID NO: 678) |
| 229 | IGF2 | AGTTTGAACGATGTAAGA |
| | (SEQ ID NO: 29) | (SEQ ID NO: 973) |
| 230 | IGF2 | AGTTTGAATGATGTAAGA |
| | (SEQ ID NO: 29) | (SEQ ID NO: 974) |
| 231 | IGF2 | GGTTATTACGATAATTTG |
| | (SEQ ID NO: 29) | (SEQ ID NO: 679) |
| 232 | IGF2 | GGTTATTATGATAATTTG |
| | (SEQ ID NO: 29) | (SEQ ID NO: 680) |
| 233 | IGF2 | TTGTATGGTCGAGTTTAT |
| | (SEQ ID NO: 29) | (SEQ ID NO: 941) |
| 234 | IGF2 | TTGTATGGTTGAGTTTAT |
| | (SEQ ID NO: 29) | (SEQ ID NO: 942) |
| 235 | IGF2 | GATTAGGGCGGGAAATAT |
| | (SEQ ID NO: 29) | (SEQ ID NO: 937) |
| 236 | IGF2 | GATTAGGGTGGGAAATAT |
| | (SEQ ID NO: 29) | (SEQ ID NO: 938) |
| 237 | IGF2 | TGGAGTTTACGGAGGTTT |
| | (SEQ ID NO: 29) | (SEQ ID NO: 681) |
| 238 | IGF2 | TGGAGTTTATGGAGGTTT |
| | (SEQ ID NO: 29) | (SEQ ID NO: 682) |
| 239 | LKB1 | TTAATTAACGGGTGGGTA |
| | (SEQ ID NO: 30) | (SEQ ID NO: 683) |
| 240 | LKB1 | TTAATTAATGGGTGGGTA |
| | (SEQ ID NO: 30) | (SEQ ID NO: 684) |
| 241 | LKB1 | TTTAGGTTCGTAAGTTTA |
| | (SEQ ID NO: 30) | (SEQ ID NO: 965) |
| 242 | LKB1 | TTTAGGTTTGTAAGTTTA |
| | (SEQ ID NO: 30) | (SEQ ID NO: 966) |
| 243 | LKB1 | AGGGAGGTCGTTGGTATT |
| | (SEQ ID NO: 30) | (SEQ ID NO: 933) |
| 244 | LKB1 | AGGGAGGTTGTTGGTATT |
| | (SEQ ID NO: 30) | (SEQ ID NO: 934) |
| 245 | MGMT | TAAGGATACGAGTTATAT |
| | (SEQ ID NO: 31) | (SEQ ID NO: 685) |
| 246 | MGMT | TAAGGATATGAGTTATAT |
| | (SEQ ID NO: 31) | (SEQ ID NO: 686) |
| 247 | MGMT | TTGGAGAGCGGTTGAGTT |
| | (SEQ ID NO: 31) | (SEQ ID NO: 687) |
| 248 | MGMT | TTGGAGAGTGGTTGAGTT |
| | (SEQ ID NO: 31) | (SEQ ID NO: 688) |
| 249 | MGMT | TAGGTTATCGGTGATTGT |
| | (SEQ ID NO: 31) | (SEQ ID NO: 689) |
| 250 | MGMT | TAGGTTATTGGTGATTGT |
| | (SEQ ID NO: 31) | (SEQ ID NO: 690) |
| 251 | MGMT | TAGGGGAGCGGTTTTAGG |
| | (SEQ ID NO: 31) | (SEQ ID NO: 691) |
| 252 | MGMT | TAGGGGAGTGGTTTTAGG |
| | (SEQ ID NO: 31) | (SEQ ID NO: 692) |
| 253 | MGMT | AGTAGGATCGGGATTTTT |
| | (SEQ ID NO: 31) | (SEQ ID NO: 1001) |
| 254 | MGMT | AGTAGGATTGGGATTTTT |
| | (SEQ ID NO: 31) | (SEQ ID NO: 1002) |
| 255 | MLH1 | TTGAGAAGCGTTAAGTAT |
| | (SEQ ID NO: 32) | (SEQ ID NO: 693) |
| 256 | MLH1 | TTGAGAAGTGTTAAGTAT |
| | (SEQ ID NO: 32) | (SEQ ID NO: 694) |
| 257 | MLH1 | TTAGGTAGCGGGTAGTAG |
| | (SEQ ID NO: 32) | (SEQ ID NO: 949) |
| 258 | MLH1 | TTAGGTAGTGGGTAGTAG |
| | (SEQ ID NO: 32) | (SEQ ID NO: 950) |
| 259 | MLH1 | GTAGTAGTCGTTTTAGGG |
| | (SEQ ID NO: 32) | (SEQ ID NO: 695) |
| 260 | MLH1 | GTAGTAGTTGTTTTAGGG |
| | (SEQ ID NO: 32) | (SEQ ID NO: 696) |
| 261 | MLH1 | ATAGTTGTCGTTGAAGGG |
| | (SEQ ID NO: 32) | (SEQ ID NO: 697) |
| 262 | MLH1 | ATAGTTGTCGTTGAAGGG |
| | (SEQ ID NO: 32) | (SEQ ID NO: 698) |
| 263 | MLH1 | TTGGATGGCGTAAGTTAT |
| | (SEQ ID NO: 32) | (SEQ ID NO: 699) |
| 264 | MLH1 | TTGGATGGTGTAAGTTAT |
| | (SEQ ID NO: 32) | (SEQ ID NO: 700) |
| 265 | MNCA9 | TAAAAGGGCGTTTTGTGA |
| | (SEQ ID NO: 33) | (SEQ ID NO: 701) |
| 266 | MNCA9 | TAAAAGGGCGTTTTGTGA |
| | (SEQ ID NO: 33) | (SEQ ID NO: 702) |
| 267 | MNCA9 | TAGTTAGTCGTATGGTTT |
| | (SEQ ID NO: 33) | (SEQ ID NO: 703) |
| 268 | MNCA9 | TAGTTAGTTGTATGGTTT |
| | (SEQ ID NO: 33) | (SEQ ID NO: 704) |
| 269 | MNCA9 | GATTTATTCGGAGAGGAG |
| | (SEQ ID NO: 33) | (SEQ ID NO: 705) |
| 270 | MNCA9 | GATTTATTCGGAGAGGAG |
| | (SEQ ID NO: 33) | (SEQ ID NO: 706) |
| 271 | MSH3 | ATTTTTCGTTCGATGATA |
| | (SEQ ID NO: 34) | (SEQ ID NO: 707) |
| 272 | MSH3 | ATTTTTTGTTTGATGATA |
| | (SEQ ID NO: 34) | (SEQ ID NO: 708) |
| 273 | MSH3 | AGTTTAGTCGGGGTTATA |
| | (SEQ ID NO: 34) | (SEQ ID NO: 709) |
| 274 | MSH3 | AGTTTAGTTGGGGTTATA |
| | (SEQ ID NO: 34) | (SEQ ID NO: 710) |
| 275 | MSH3 | GGGTGAAGCGTTGAGGTT |
| | (SEQ ID NO: 34) | (SEQ ID NO: 711) |
| 276 | MSH3 | GGGTGAAGTGTTGAGGTT |
| | (SEQ ID NO: 34) | (SEQ ID NO: 712) |
| 277 | MSH3 | AGTATTTTCGTTTGAGGA |
| | (SEQ ID NO: 34) | (SEQ ID NO: 1015) |
| 278 | MSH3 | AGTATTTTTGTTTGAGGA |
| | (SEQ ID NO: 34) | (SEQ ID NO: 1016) |
| 279 | MYC | TTAGAGTGTTCGGTTGTT |
| | (SEQ ID NO: 35) | (SEQ ID NO: 713) |
| 280 | MYC | TTAGAGTGTTTGGTTGTT |
| | (SEQ ID NO: 35) | (SEQ ID NO: 714) |
| 281 | MYC | TTATAATGCGAGGGTTTG |
| | (SEQ ID NO: 35) | (SEQ ID NO: 1019) |
| 282 | MYC | TTATAATGTGAGGGTTTG |
| | (SEQ ID NO: 35) | (SEQ ID NO: 1020) |
| 283 | MYC | AGGATTTTCGAGTTGTGT |
| | (SEQ ID NO: 35) | (SEQ ID NO: 715) |
| 284 | MYC | AGGATTTTTGAGTTGTGT |
| | (SEQ ID NO: 35) | (SEQ ID NO: 716) |
| 285 | MYC | AATTTTAGCGAGAGGTAG |
| | (SEQ ID NO: 35) | (SEQ ID NO: 717) |
| 286 | MYC | AATTTTAGTGAGAGGTAG |
| | (SEQ ID NO: 35) | (SEQ ID NO: 718) |
| 287 | N33 | TTGGTTCGGGAAAGGTAA |
| | (SEQ ID NO: 36) | (SEQ ID NO: 977) |
| 288 | N33 | TTGGTTTGGGAAAGGTAA |
| | (SEQ ID NO: 36) | (SEQ ID NO: 978) |
| 289 | N33 | TGTTATTTCGGAGGGTTT |
| | (SEQ ID NO: 36) | (SEQ ID NO: 909) |
| 290 | N33 | TGTTATTTTGGAGGGTTT |
| | (SEQ ID NO: 36) | (SEQ ID NO: 910) |
| 291 | N33 | GTTTAGTTAGCGGGTTTT |
| | (SEQ ID NO: 36) | (SEQ ID NO: 943) |
| 292 | N33 | GTTTAGTTAGTGGGTTTT |
| | (SEQ ID NO: 36) | (SEQ ID NO: 944) |
| 293 | N33 | ATTTAGTTCGGGGGAGGA |
| | (SEQ ID NO: 36) | (SEQ ID NO: 993) |
| 294 | N33 | ATTTAGTTTGGGGGAGGA |
| | (SEQ ID NO: 36) | (SEQ ID NO: 994) |
| 295 | PAX6 | TATTGTTTCGGTTGTTAG |
| | (SEQ ID NO: 37) | (SEQ ID NO: 719) |
| 296 | PAX6 | TATTGTTTTGGTTGTTAG |
| | (SEQ ID NO: 37) | (SEQ ID NO: 720) |
| 297 | PAX6 | GTTAGTAGCGAGTTTAGG |
| | (SEQ ID NO: 37) | (SEQ ID NO: 721) |
| 298 | PAX6 | GTTAGTAGTGAGTTTAGG |
| | (SEQ ID NO: 37) | (SEQ ID NO: 722) |
| 299 | PAX6 | AGAGTTTAGCGTATTTTT |
| | (SEQ ID NO: 37) | (SEQ ID NO: 723) |
| 300 | PAX6 | AGAGTTTAGTGTATTTTT |
| | (SEQ ID NO: 37) | (SEQ ID NO: 724) |
| 301 | PGR | GAATTTAGCGAGGGATTG |
| | (SEQ ID NO: 38) | (SEQ ID NO: 725) |
| 302 | PGR | GAATTTAGTGAGGGATTG |
| | (SEQ ID NO: 38) | (SEQ ID NO: 726) |
| 303 | PGR | AGTATGTACGAGTTTGAT |
| | (SEQ ID NO: 38) | (SEQ ID NO: 727) |
| 304 | PGR | AGTATGTATGAGTTTGAT |
| | (SEQ ID NO: 38) | (SEQ ID NO: 728) |
| 305 | PGR | TTAAGTGTCGGATTTGTG |
| | (SEQ ID NO: 38) | (SEQ ID NO: 1011) |
| 306 | PGR | TTAAGTGTTGGATTTGTG |
| | (SEQ ID NO: 38) | (SEQ ID NO: 1012) |
| 307 | PGR | GGGATAAACGATAGTTAT |
| | (SEQ ID NO: 38) | (SEQ ID NO: 729) |
| 308 | PGR | GGGATAAATGATAGTTAT |
| | (SEQ ID NO: 38) | (SEQ ID NO: 730) |
| 309 | PTEN | AGAGTTTGCGGTTTGGGG |
| | (SEQ ID NO: 39) | (SEQ ID NO: 731) |
| 310 | PTEN | AGAGTTTGTGGTTTGGGGT |
| | (SEQ ID NO: 39) | (SEQ ID NO: 732) |
| 311 | PTEN | ATTTTGCGTTCGTATTTA |
| | (SEQ ID NO: 39) | (SEQ ID NO: 987) |
| 312 | PTEN | ATTTTGTGTTTGTATTTA |
| | (SEQ ID NO: 39) | (SEQ ID NO: 988) |
| 313 | PTEN | AGAGTTATCGTTTTGTTT |
| | (SEQ ID NO: 39) | (SEQ ID NO: 957) |
| 314 | PTEN | AGAGTTATTGTTTTGTTT |
| | (SEQ ID NO: 39) | (SEQ ID NO: 958) |
| 315 | PTEN | TGATGTGGCGGGATTTTT |
| | (SEQ ID NO: 39) | (SEQ ID NO: 947) |
| 316 | PTEN | TGATGTGGTGGGATTTTT |
| | (SEQ ID NO: 39) | (SEQ ID NO: 948) |
| 317 | RARB | TAGTAGTTCGGGTAGGGT |
| | (SEQ ID NO: 40) | (SEQ ID NO: 991) |
| 318 | RARB | TAGTAGTTTGGGTAGGGT |
| | (SEQ ID NO: 40) | (SEQ ID NO: 992) |
| 319 | RARB | GGGTTTATCGAAAGTTTA |
| | (SEQ ID NO: 40) | (SEQ ID NO: 733) |
| 320 | RARB | GGGTTTATTGAAAGTTTA |
| | (SEQ ID NO: 40) | (SEQ ID NO: 734) |
| 321 | RARB | AGTTTATTCGTATATATT |
| | (SEQ ID NO: 40) | (SEQ ID NO: 735) |
| 322 | RARB | AGTTTATTTGTATATATT |
| | (SEQ ID NO: 40) | (SEQ ID NO: 736) |
| 323 | RARB | TTTTTATGCGAGTTGTTT |
| | (SEQ ID NO: 40) | (SEQ ID NO: 737) |
| 324 | RARB | TCTTTATGTGAGTTGTTT |
| | (SEQ ID NO: 40) | (SEQ ID NO: 738) |
| 325 | SFN | ATAGAGTTCGGTATTGGT |
| | (SEQ ID NO: 41) | (SEQ ID NO: 739) |
| 326 | SFN | ATAGAGTTTGGTATTGGT |
| | (SEQ ID NO: 41) | (SEQ ID NO: 740) |
| 327 | SFN | GTAGGTCGAACGTTATGA |
| | (SEQ ID NO: 41) | (SEQ ID NO: 741) |
| 328 | SFN | GTAGGTTGAATGTTATGA |
| | (SEQ ID NO: 41) | (SEQ ID NO: 742) |
| 329 | SFN | AAAAGTAACGAGGAGGGT |
| | (SEQ ID NO: 41) | (SEQ ID NO: 743) |
| 330 | SFN | AAAAGTAATGAGGAGGGT |
| | (SEQ ID NO: 41) | (SEQ ID NO: 744) |
| 331 | S100A2 | TTAATTGCGGTTGTGTG |
| | (SEQ ID NO: 42) | (SEQ ID NO: 745) |
| 332 | S100A2 | TTTAATTGTGGTTGTGTG |
| | (SEQ ID NO: 42) | (SEQ ID NO: 746) |
| 333 | S100A2 | TATATAGGCGTATGTATG |
| | (SEQ ID NO: 42) | (SEQ ID NO: 747) |
| 334 | S100A2 | TATATAGGTGTATGTATG |
| | (SEQ ID NO: 42) | (SEQ ID NO: 748) |
| 335 | S100A2 | TATGTATACGAGTATTGG |
| | (SEQ ID NO: 42) | (SEQ ID NO: 999) |
| 336 | S100A2 | TATGTATATGAGTATTGG |
| | (SEQ ID NO: 42) | (SEQ ID NO: 1000) |
| 337 | S100A2 | AGTTTTAGCGTGTGTTTA |
| | (SEQ ID NO: 42) | (SEQ ID NO: 749) |
| 338 | S100A2 | AGTTTTAGTGTGTGTTTA |
| | (SEQ ID NO: 42) | (SEQ ID NO: 750) |
| 339 | TGFBR2 | ATTTGGAGCGAGGAATTT |
| | (SEQ ID NO: 43) | (SEQ ID NO: 751) |
| 340 | TGFBR2 | ATTTGGAGTGAGGAATTT |
| | (SEQ ID NO: 43) | (SEQ ID NO: 752) |
| 341 | TGFBR2 | TTGAAAGTCGGTTAAAGT |
| | (SEQ ID NO: 43) | (SEQ ID NO: 753) |
| 342 | TGFBR2 | TTGAAAGTTGGTTAAAGT |
| | (SEQ ID NO: 43) | (SEQ ID NO: 754) |
| 343 | TGFBR2 | AAAGTTTTCGGAGGGGTT |
| | (SEQ ID NO: 43) | (SEQ ID NO: 907) |
| 344 | TGFBR2 | AAAGTTTTTGGAGGGGTT |
| | (SEQ ID NO: 43) | (SEQ ID NO: 908) |
| 345 | TGFBR2 | GGTAGTTACGAGAGAGTT |
| | (SEQ ID NO: 43) | (SEQ ID NO: 755) |
| 346 | TGFBR2 | GGTAGTTATGAGAGAGTT |
| | (SEQ ID NO: 43) | (SEQ ID NO: 756) |
| 347 | TIMP3 | AGGTTTTTCGTTGGAGAA |
| | (SEQ ID NO: 44) | (SEQ ID NO: 757) |
| 348 | TIMP3 | AGGTTTTTTGTTGGAGAA |
| | (SEQ ID NO: 44) | (SEQ ID NO: 758) |
| 349 | TIMP3 | GAAAATATCGGTATTTTG |
| | (SEQ ID NO: 44) | (SEQ ID NO: 759) |
| 350 | TTMP3 | GAAAATATTGGTATTTTG |
| | (SEQ ID NO: 44) | (SEQ ID NO: 760) |
| 351 | TIMP3 | GGGATAAGCGAATTTTTT |
| | (SEQ ID NO: 44) | (SEQ ID NO: 761) |
| 352 | TIMP3 | GGGATAAGTGAATTTTTT |
| | (SEQ ID NO: 44) | (SEQ ID NO: 762) |
| 353 | TIMP3 | TTTTATTACGTATGTTTT |
| | (SEQ ID NO: 44) | (SEQ ID NO: 763) |
| 354 | TIMP3 | TTTTATTATGTATGTTTT |
| | (SEQ ID NO: 44) | (SEQ ID NO: 764) |
| 355 | TP53 | AAGTTGAACGTTTAGGTA |
| | (SEQ ID NO: 45) | (SEQ ID NO: 765) |
| 356 | TP53 | AAGTTGAATGTTTAGGTA |
| | (SEQ ID NO: 45) | (SEQ ID NO: 766) |
| 357 | TP53 | TTTTGAGTCGGTTTAAAG |
| | (SEQ ID NO: 45) | (SEQ ID NO: 767) |
| 358 | TP53 | TTTTGAGTTGGTTTAAAG |
| | (SEQ ID NO: 45) | (SEQ ID NO: 768) |
| 359 | TP53 | TATTTATTCGGTGTTGGG |
| | (SEQ ID NO: 45) | (SEQ ID NO: 769) |
| 360 | TP53 | TATTTATTTGGTGTTGGG |
| | (SEQ ID NO: 45) | (SEQ ID NO: 770) |
| 361 | TP53 | TTGGATTTCGAAATATTG |
| | (SEQ ID NO: 45) | (SEQ ID NO: 771) |
| 362 | TP53 | TTGGATTTTGAAATATTG |
| | (SEQ ID NO: 45) | (SEQ ID NO: 772) |
| 363 | TP73 | TGATTTAGCGTAGGTTTG |
| | (SEQ ID NO: 46) | (SEQ ID NO: 773) |
| 364 | TP73 | TGATTTAGTGTAGGTTTG |
| | (SEQ ID NO: 46) | (SEQ ID NO: 774) |
| 365 | TP73 | TTAGAGTTCGAGTTTATA |
| | (SEQ ID NO: 46) | (SEQ ID NO: 775) |
| 366 | TP73 | TTAGAGTTTGAGTTTATA |
| | (SEQ ID NO: 46) | (SEQ ID NO: 776) |
| 367 | TP73 | AAGTTACGGGTTTTATTG |
| | (SEQ ID NO: 46) | (SEQ ID NO: 915) |
| 368 | TP73 | AAGTTATGGGTTTTATTG |
| | (SEQ ID NO: 46) | (SEQ ID NO: 916) |
| 369 | TP73 | GGAAGTTTCGATGGTTTA |
| | (SEQ ID NO: 46) | (SEQ ID NO: 777) |
| 370 | TP73 | GGAAGTTTTGATGGTTTA |
| | (SEQ ID NO: 46) | (SEQ ID NO: 778) |
| 371 | VHL | TTTATAAGCGTGATGATT |
| | (SEQ ID NO: 47) | (SEQ ID NO: 779) |
| 372 | VHL | TTTATAAGTGTGATGATT |
| | (SEQ ID NO: 47) | (SEQ ID NO: 780) |
| 373 | VHL | GGTGTTTTCGTGTGAGAT |
| | (SEQ ID NO: 47) | (SEQ ID NO: 781) |
| 374 | VHL | GGTGTTTTTGTGTGAGAT |
| | (SEQ ID NO: 47) | (SEQ ID NO: 782) |
| 375 | VHL | TGTGAGATGCGTTATTTT |
| | (SEQ ID NO: 47) | (SEQ ID NO: 783) |
| 376 | VHL | TGTGAGATGTGTTATTTT |
| | (SEQ ID NO: 47) | (SEQ ID NO: 784) |
| 377 | VHL | TATATTGCGCGTTTGATA |
| | (SEQ ID NO: 47) | (SEQ ID NO: 785) |
| 378 | VHL | TATATTGTGTGTTTGATA |
| | (SEQ ID NO: 47) | (SEQ ID NO: 786) |
| 379 | CDKN1C | ATGAAGAACGGTTAAGGG |
| | (SEQ ID NO: 48) | (SEQ ID NO: 787) |
| 380 | CDKN1C | ATGAAGAATGGTTAAGGG |
| | (SEQ ID NO: 48) | (SEQ ID NO: 788) |
| 381 | CDKN1C | TTTTATTTCGAGTTAGGT |
| | (SEQ ID NO: 48) | (SEQ ID NO: 789) |
| 382 | CDKN1C | TTTTATTTCGAGTTAGGT |
| | (SEQ ID NO: 48) | (SEQ ID NO: 790) |
| 383 | CDKN1C | TTAAGTTACGGTTATTAG |
| | (SEQ ID NO: 48) | (SEQ ID NO: 791) |
| 384 | CDKN1C | TTAAGTTATGGTTATTAG |
| | (SEQ ID NO: 48) | (SEQ ID NO: 792) |
| 385 | CDKN1C | TTAGTGTTCGTTTGGAAT |
| | (SEQ ID NO: 48) | (SEQ ID NO: 793) |
| 386 | CDKN1C | TTAGTGTTTGTTTGGAAT |
| | (SEQ ID NO: 48) | (SEQ ID NO: 794) |
| 387 | CAV1 | TTGGTATCGTTGAAGAAT |
| | (SEQ ID NO: 49) | (SEQ ID NO: 795) |
| 388 | CAV1 | TTGGTATCGTTGAAGAAT |
| | (SEQ ID NO: 49) | (SEQ ID NO: 796) |
| 389 | CAV1 | TAGATTCGGAGGTAGGTA |
| | (SEQ ID NO: 49) | (SEQ ID NO: 911) |
| 390 | CAV1 | TAGATTTGGAGGTAGGTA |
| | (SEQ ID NO: 49) | (SEQ ID NO: 912) |
| 391 | CAV1 | TGGGGGTTCGAAAAAGTG |
| | (SEQ ID NO: 49) | (SEQ ID NO: 797) |
| 392 | CAV1 | TGGGGGTTTGAAAAAGTG |
| | (SEQ ID NO: 49) | (SEQ ID NO: 798) |
| 393 | CAV1 | GAAGTGTTCGTTTTTGTT |
| | (SEQ ID NO: 49) | (SEQ ID NO: 799) |
| 394 | CAV1 | GAAGTGTTTGTTTTTGTT |
| | (SEQ ID NO: 49) | (SEQ ID NO: 800) |
| 395 | CDH13 | GAAGTGGTCGTTAGTTTT |
| | (SEQ ID NO: 50) | (SEQ ID NO: 801) |
| 396 | CDH13 | GAAGTGGTTGTTAGTTTTT |
| | (SEQ ID NO: 50) | (SEQ ID NO: 802) |
| 397 | CDH13 | TTGTTTAGCGTGATTTGT |
| | (SEQ ID NO: 50) | (SEQ ID NO: 803) |
| 398 | CDH13 | TTGTTTAGTGTGATTTGT |
| | (SEQ ID NO: 50) | (SEQ ID NO: 804) |
| 399 | CDH13 | AAGGAATTCGTTTTGTAA |
| | (SEQ ID NO: 50) | (SEQ ID NO: 903) |
| 400 | CDH13 | AAGGAATTTGTTTTGTAA |
| | (SEQ ID NO: 50) | (SEQ ID NO: 904) |
| 401 | CDH13 | AATGTTTTCGTGATGTTG |
| | (SEQ ID NO: 50) | (SEQ ID NO: 895) |
| 402 | CDH13 | AATGTTTTTGTGATGTTG |
| | (SEQ ID NO: 50) | (SEQ ID NO: 896) |
| 403 | DRG1 | GAGTAGGACGGTGTTAAG |
| | (SEQ ID NO: 51) | (SEQ ID NO: 805) |
| 404 | DRG1 | GAGTAGGATGGTGTTAAG |
| | (SEQ ID NO: 51) | (SEQ ID NO: 806) |
| 405 | DRG1 | AAATTTAACGTTGGGTAG |
| | (SEQ ID NO: 51) | (SEQ ID NO: 807) |
| 406 | DRG1 | AAATTTAATGTTGGGTAG |
| | (SEQ ID NO: 51) | (SEQ ID NO: 808) |
| 407 | DRG1 | GATAATGACGGTGTTAGT |
| | (SEQ ID NO: 51) | (SEQ ID NO: 809) |
| 408 | DRG1 | GATAATGATGGTGTTAGT |
| | (SEQ ID NO: 51) | (SEQ ID NO: 810) |
| 409 | DRG1 | TGGTTGTACGTTAGGAGT |
| | (SEQ ID NO: 51) | (SEQ ID NO: 811) |
| 410 | DRG1 | TGGTTGTATGTTAGGAGT |
| | (SEQ ID NO: 51) | (SEQ ID NO: 812) |
| 411 | PTGS2 | TTTATTTTCGTGGGTAAA |
| | (SEQ ID NO: 52) | (SEQ ID NO: 913) |
| 412 | PTGS2 | TTTATTTTTGTGGGTAAA |
| | (SEQ ID NO: 52) | (SEQ ID NO: 914) |
| 413 | PTGS2 | AGTTATTTCGTTATATGG |
| | (SEQ ID NO: 52) | (SEQ ID NO: 1007) |
| 414 | PTGS2 | AGTTATTTTGTTATATGG |
| | (SEQ ID NO: 52) | (SEQ ID NO: 1008) |
| 415 | PTGS2 | ATTTAAGGCGATTAGTTT |
| | (SEQ ID NO: 52) | (SEQ ID NO: 813) |
| 416 | PTGS2 | ATTTAAGGTGATTAGTTT |
| | (SEQ ID NO: 52) | (SEQ ID NO: 814) |
| 417 | PTGS2 | ATATTTGGCGGAAATTTG |
| | (SEQ ID NO: 52) | (SEQ ID NO: 1023) |
| 418 | PTGS2 | ATATTTGGTGGAAATTTG |
| | (SEQ ID NO: 52) | (SEQ ID NO: 1024) |
| 419 | THBS1 | GGAGAGTTAGCGAGGGTT |
| | (SEQ ID NO: 53) | (SEQ ID NO: 815) |
| 420 | THBS1 | GGAGAGTTAGTGAGGGTT |
| | (SEQ ID NO: 53) | (SEQ ID NO: 816) |
| 421 | THBS1 | TATTTTAACGAATGGTTT |
| | (SEQ ID NO: 53) | (SEQ ID NO: 817) |
| 422 | THBS1 | TATTTTAATGAATGGTTT |
| | (SEQ ID NO: 53) | (SEQ ID NO: 818) |
| 423 | THBS1 | TTATAAAACGGGTTTAGT |
| | (SEQ ID NO: 53) | (SEQ ID NO: 819) |
| 424 | THBS1 | TTATAAAATGGGTTTAGT |
| | (SEQ ID NO: 53) | (SEQ ID NO: 820) |
| 425 | THBS1 | AGGTATTTCGGGAGATTA |
| | (SEQ ID NO: 53) | (SEQ ID NO: 821) |
| 426 | THBS1 | AGGTATTTTGGGAGATTA |
| | (SEQ ID NO: 53) | (SEQ ID NO: 822) |
| 427 | TPEF | ATTTGTTTCGATTAATTT |
| | (= TMEFF2 = HPP1) | (SEQ ID NO: 979) |
| | (SEQ ID NO: 54) | |
| 428 | TPEF | ATTTGTTTTGATTAATTT |
| | (= TMEFF2 = HPP1) | (SEQ ID NO: 980) |
| | (SEQ ID NO: 54) | |
| 429 | TPEF | ATAGGTTACGGGTTGGAG |
| | (= TMEFF2; = HPP1) | (SEQ ID NO: 917) |
| | (SEQ ID NO: 54) | |
| 430 | TPEF | ATAGGTTATGGGTTGGAG |
| | (= TMEFF2; = HPP1) | (SEQ ID NO: 918) |
| | (SEQ ID NO: 54) | |
| 431 | TPEF | AATTTGCGAACGTTTGGG |
| | (= TMEFF2; = HPP1) | (SEQ ID NO: 899) |
| | (SEQ ID NO: 54) | |
| 432 | TPEF | AATTTGTGAATGTTTGGG |
| | (= TMEFF2; = HPP1) | (SEQ ID NO: 900) |
| | (SEQ ID NO: 54) | |
| 433 | DNMT1 | AGTGGGTTCGTTTAAGTT |
| | (SEQ ID NO: 55) | (SEQ ID NO: 823) |
| 434 | DNMT1 | AGTGGGTTTGTTTAAGTT |
| | (SEQ ID NO: 55) | (SEQ ID NO: 824) |
| 435 | DNMT1 | TTTTTTACGCGGAGTAGT |
| | (SEQ ID NO: 55) | (SEQ ID NO: 825) |
| 436 | DNMT1 | TTTTTTATGTGGAGTAGT |
| | (SEQ ID NO: 55) | (SEQ ID NO: 826) |
| 437 | DNMT1 | GAGAGAGGCGATATTTTG |
| | (SEQ ID NO: 55) | (SEQ ID NO: 827) |
| 438 | DNMT1 | GAGAGAGGTGATATTTTG |
| | (SEQ ID NO: 55) | (SEQ ID NO: 828) |
| 439 | DNMT1 | GTATTAAACGGAGAGAGG |
| | (SEQ ID NO: 55) | (SEQ ID NO: 829) |
| 440 | DNMT1 | GTATTAAATGGAGAGAGG |
| | (SEQ ID NO: 55) | (SEQ ID NO: 830) |
| 441 | CEA | AAGTGTTCGCGGTTGTTT |
| | (SEQ ID NO: 56) | (SEQ ID NO: 1003) |
| 442 | CEA | AAGTGTTTGTGGTTGTTT |
| | (SEQ ID NO: 56) | (SEQ ID NO: 1004) |
| 443 | CEA | TTTTGAGTCGTAGTTTAG |
| | (SEQ ID NO: 56) | (SEQ ID NO: 831) |
| 444 | CEA | TTTGAGTTGTAGTTTAG |
| | (SEQ ID NO: 56) | (SEQ ID NO: 832) |
| 445 | CEA | AA TAGATACGGAGAGGGA |
| | (SEQ ID NO: 56) | (SEQ ID NO: 833) |
| 446 | CEA | AATAGATATGGAGAGGGA |
| | (SEQ ID NO: 56) | (SEQ ID NO: 834) |
| 447 | MB | AGAAGGTGCGTGAGAGGT |
| | (SEQ ID NO: 57) | (SEQ ID NO: 835) |
| 448 | MB | AGAAGGTGTGTGAGAGGT |
| | (SEQ ID NO: 57) | (SEQ ID NO: 836) |
| 449 | MB | GGGTTAGTCGGGGTATTT |
| | (SEQ ID NO: 57) | (SEQ ID NO: 837) |
| 450 | MB | GGGTTAGTTGGGGTATTT |
| | (SEQ ID NO: 57) | (SEQ ID NO: 838) |
| 451 | MB | GGGGATAGCGAGTTATTG |
| | (SEQ ID NO: 57) | (SEQ ID NO: 839) |
| 452 | MB | GGGGATAGTGAGTTATTG |
| | (SEQ ID NO: 57) | (SEQ ID NO: 840) |
| 453 | MB | TTAGATTGCGTTATGGGG |
| | (SEQ ID NO: 57) | (SEQ ID NO: 841) |
| 454 | MB | TTAGATTGTGTTATGGGG |
| | (SEQ ID NO: 57) | (SEQ ID NO: 842) |
| 455 | PCNA | TAAAGAGGCGGGGAGATT |
| | (SEQ ID NO: 58) | (SEQ ID NO: 1013) |
| 456 | PCNA | TAAAGAGGTGGGGAGATT |
| | (SEQ ID NO: 58) | (SEQ ID NO: 1014) |
| 457 | PCNA | TATGGATACGATTGGTTT |
| | (SEQ ID NO: 58) | (SEQ ID NO: 843) |
| 458 | PCNA | TATGGATATGATTGGTTT |
| | (SEQ ID NO: 58) | (SEQ ID NO: 844) |
| 459 | PCNA | GTATTAAACGGTTGTAGG |
| | (SEQ ID NO: 58) | (SEQ ID NO: 845) |
| 460 | PCNA | GTATTAAATGGTTGTAGG |
| | (SEQ ID NO: 58) | (SEQ ID NO: 846) |
| 461 | PCNA | TTTGAAGTCGAAATTAGT |
| | (SEQ ID NO: 58) | (SEQ ID NO: 847) |
| 462 | PCNA | TTTGAAGTTGAAATTAGT |
| | (SEQ ID NO: 58) | (SEQ ID NO: 848) |
| 463 | CDC2 | TGGAATTTCGATGTAAAT |
| | (SEQ ID NO: 59) | (SEQ ID NO: 849) |
| 464 | CDC2 | TGGAATTTTGATGTAAAT |
| | (SEQ ID NO: 59) | (SEQ ID NO: 850) |
| 465 | CDC2 | TAGTAGGACGATATTTTT |
| | (SEQ ID NO: 59) | (SEQ ID NO: 851) |
| 466 | CDC2 | TAGTAGGATGATATTTTT |
| | (SEQ ID NO: 59) | (SEQ ID NO: 852) |
| 467 | CDC2 | TAGTTATTCGGGAAGGTT |
| | (SEQ ID NO: 59) | (SEQ ID NO: 853) |
| 468 | CDC2 | TAGTTATTTGGGAAGGTT |
| | (SEQ ID NO: 59) | (SEQ ID NO: 854) |
| 469 | CDC2 | AAATTGTTCGTATTTGGT |
| | (SEQ ID NO: 59) | (SEQ ID NO: 855) |
| 470 | CDC2 | AAATTGTTTGTATTTGGT |
| | (SEQ ID NO: 59) | (SEQ ID NO: 856) |
| 471 | ESR1 | AGATATATCGGAGTTTGG |
| | (SEQ ID NO: 60) | (SEQ ID NO: 857) |
| 472 | ESR1 | AGATATATTGGAGTTTGG |
| | (SEQ ID NO: 60) | (SEQ ID NO: 858) |
| 473 | ESR1 | GTTTGGTACGGGGTATAT |
| | (SEQ ID NO: 60) | (SEQ ID NO: 859) |
| 474 | ESR1 | GTTTGGTATGGGGTATAT |
| | (SEQ ID NO: 60) | (SEQ ID NO: 860) |
| 475 | ESR1 | TTTTAAATCGAGTTGTGT |
| | (SEQ ID NO: 60) | (SEQ ID NO: 861) |
| 476 | ESR1 | TTTTAAATTGAGTTGTGT |
| | (SEQ ID NO: 60) | (SEQ ID NO: 862) |
| 477 | ESR1 | TATGAGTTCGGGAGATTA |
| | (SEQ ID NO: 60) | (SEQ ID NO: 863) |
| 478 | ESR1 | TATGAGTTTGGGAGATTA |
| | (SEQ ID NO: 60) | (SEQ ID NO: 864) |
| 479 | ESR1 | TGGAGGTTCGGGAGTTTA |
| | (SEQ ID NO: 60) | (SEQ ID NO: 969) |
| 480 | ESR1 | TGGAGGTTTGGGAGTTTA |
| | (SEQ ID NO: 60) | (SEQ ID NO: 970) |
| 481 | CASP8 | GAATGAGTCGAGGAAGGT |
| | (SEQ ID NO: 61) | (SEQ ID NO: 865) |
| 482 | CASP8 | GAATGAGTTGAGGAAGGT |
| | (SEQ ID NO: 61) | (SEQ ID NO: 866) |
| 483 | CASP8 | TATTGAGACGTTAAGTAA |
| | (SEQ ID NO: 61) | (SEQ ID NO: 867) |
| 484 | CASP8 | TATTGAGATGTTAAGTAA |
| | (SEQ ID NO: 61) | (SEQ ID NO: 868) |
| 485 | CASP8 | TAAGGTTACGTAGTTAGT |
| | (SEQ ID NO: 61) | (SEQ ID NO: 869) |
| 486 | CASP8 | TAAGGTTATGTAGTTAGT |
| | (SEQ ID NO: 61) | (SEQ ID NO: 870) |
| 487 | CASP8 | GTTAATAGCGGGGATTTT |
| | (SEQ ID NO: 61) | (SEQ ID NO: 871) |
| 488 | CASP8 | GTTAATAGTGGGGATTTT |
| | (SEQ ID NO: 61) | (SEQ ID NO: 872) |
| 489 | RASSF1 | GTAGTTTTCGAGAATGTT |
| | (SEQ ID NO: 62) | (SEQ ID NO: 873) |
| 490 | RASSF1 | GTAGTTTTTGAGAATGTT |
| | (SEQ ID NO: 62) | (SEQ ID NO: 874) |
| 491 | RASSF1 | TAATTAGAACGTTTTTTG |
| | (SEQ ID NO: 62) | (SEQ ID NO: 875) |
| 492 | RASSF1 | TAATTAGAATGTTTTTTG |
| | (SEQ ID NO: 62) | (SEQ ID NO: 876) |
| 493 | RASSF1 | TAGTTTTCGCGTAGAATT |
| | (SEQ ID NO: 62) | (SEQ ID NO: 877) |
| 494 | RASSF1 | TAGTTTTTGTGTAGAATT |
| | (SEQ ID NO: 62) | (SEQ ID NO: 878) |
| 495 | RASSF1 | TTTGTAGCGGGTGGAGTA |
| | (SEQ ID NO: 62) | (SEQ ID NO: 995) |
| 496 | RASSF1 | TTTGTAGTGGGTGGAGTA |
| | (SEQ ID NO: 62) | (SEQ ID NO: 996) |
| 497 | MSH4 | TTGTTTCGGCGGTTTTTT |
| | (SEQ ID NO: 63) | (SEQ ID NO: 879) |
| 498 | MSH4 | TTGTTTTGGTGGTTTTTT |
| | (SEQ ID NO: 63) | (SEQ ID NO: 880) |
| 499 | MSH4 | TTTTGGTACGTTAGGAGT |
| | (SEQ ID NO: 63) | (SEQ ID NO: 881) |
| 500 | MSH4 | TTTTGGTATGTTAGGAGT |
| | (SEQ ID NO: 63) | (SEQ ID NO: 882) |
| 501 | MSH4 | TAAATTTTCGGTTAGTTT |
| | (SEQ ID NO: 63) | (SEQ ID NO: 883) |
| 502 | MSH4 | TAAATTTTTGGTTAGTTT |
| | (SEQ ID NO: 63) | (SEQ ID NO: 884) |
| 503 | MSH4 | TTAGAGGTCGGTAGTTTA |
| | (SEQ ID NO: 63) | (SEQ ID NO: 885) |
| 504 | MSH4 | TTAGAGGTTGGTAGTTTA |
| | (SEQ ID NO: 63) | (SEQ ID NO: 886) |
| 505 | MSH5 | ATGTTTATCGTTTTGAGT |
| | (SEQ ID NO: 64) | (SEQ ID NO: 887) |
| 506 | MSH5 | ATGTTTATTGTTTTGAGT |
| | (SEQ ID NO: 64) | (SEQ ID NO: 888) |
| 507 | MSH5 | ATAGTTGTCGAATGTATG |
| | (SEQ ID NO: 64) | (SEQ ID NO: 889) |
| 508 | MSH5 | ATAGTTGTTGAATGTATG |
| | (SEQ ID NO: 64) | (SEQ ID NO: 890) |
| 509 | MSH5 | TAGAAGTGCGAAGGGGTA |
| | (SEQ ID NO: 64) | (SEQ ID NO: 891) |
| 510 | MSH5 | TAGAAGTGTGAAGGGGTA |
| | (SEQ ID NO: 64) | (SEQ ID NO: 892) |
| 511 | MSH5 | ATGTAATTCGAATGTTTT |
| | (SEQ ID NO: 64) | (SEQ ID NO: 893) |
| 512 | MSH5 | ATGTAATTTGAATGTTTT |
| | (SEQ ID NO: 64) | (SEQ ID NO: 894) |

TABLE 3
Oligonucleotides used in differentiation between
colon adenomas or carcinoma tissue and healthy
colon tissue.

| No: | Gene | Oligo: |
|---|---|---|
| 1 | CDH13 | AATGTTTTCGTGATGTTG |
| | (SEQ ID NO: 50) | (SEQ ID NO: 895) |
| 2 | CDH13 | AATGTTTTTGTGATGTTG |
| | (SEQ ID NO: 50) | (SEQ ID NO: 896) |
| 3 | CD44 | TTGTTTAGCGGATTTTAG |
| | (SEQ ID NO: 20) | (SEQ ID NO: 897) |
| 4 | CD44 | TTGTTTAGTGGATTTTAG |
| | (SEQ ID NO: 20) | (SEQ ID NO: 898) |
| 5 | TPEF | AATTTGCGAACGTTTGGG |
| | (= TMEFF2; = HPP1) | (SEQ ID NO: 899) |
| | (SEQ ID NO: 54) | |
| 6 | TPEF | AATTTGTGAATGTTTGGG |
| | (= TMEFF2; = HPP1) | (SEQ ID NO: 900) |
| | (SEQ ID NO: 54) | |
| 7 | CSPG2 | GGGTAACGTCGAATTTAG |
| | (SEQ ID NO: 21) | (SEQ ID NO: 901) |
| 8 | CSPG2 | GGGTAATGTTGAATTTAG |
| | (SEQ ID NO: 21) | (SEQ ID NO: 902) |
| 9 | CDH13 | AAGGAATTCGTTTTGTAA |
| | (SEQ ID NO: 50) | (SEQ ID NO: 903) |
| 10 | CDH13 | AAGGAATTTGTTTTGTAA |
| | (SEQ ID NO: 50) | (SEQ ID NO: 904) |
| 11 | GSTP1 | GGAGTTCGCGGGATTTTT |
| | (SEQ ID NO: 25) | (SEQ ID NO: 905) |
| 12 | GSTP1 | GGAGTTTGTGGGATTTTT |
| | (SEQ ID NO: 25) | (SEQ ID NO: 906) |
| 13 | TGFBR2 | AAAGTTTTCGGAGGGGTT |
| | (SEQ ID NO: 43) | (SEQ ID NO: 907) |
| 14 | TGFBR2 | AAAGTTTTTGGAGGGGTT |
| | (SEQ ID NO: 43) | (SEQ ID NO: 908) |
| 15 | N33 | TGTTATTTCGGAGGGTTT |
| | (SEQ ID NO: 36) | (SEQ ID NO: 909) |
| 16 | N33 | TGTTATTTTGGAGGGTTT |
| | (SEQ ID NO: 36) | (SEQ ID NO: 910) |
| 17 | CAV1 | TAGATTCGGAGGTAGGTA |
| | (SEQ ID NO: 49) | (SEQ ID NO: 911) |
| 18 | CAV1 | TAGATTTGGAGGTAGGTA |
| | (SEQ ID NO: 49) | (SEQ ID NO: 912) |
| 19 | PTGS2 | TTTATTTTCGTGGGTAAA |
| | (SEQ ID NO: 52) | (SEQ ID NO: 913) |
| 20 | PTGS2 | TTTATTTTTGTGGGTAAA |
| | (SEQ ID NO: 52) | (SEQ ID NO: 914) |
| 21 | TP73 | AAGTTACGGGTTTTATTG |
| | (SEQ ID NO: 46) | (SEQ ID NO: 915) |
| 22 | TP73 | AAGTTATGGGTTTTATTG |
| | (SEQ ID NO: 46) | (SEQ ID NO: 916) |
| 23 | TPEF | ATAGGTTACGGGTTGGAG |
| | (= TMEFF2; = HPP1) | (SEQ ID NO: 917) |
| | (SEQ ID NO: 54) | |
| 24 | TPEF | ATAGGTTATGGGTTGGAG |
| | (= TMEFF2; = HPP1) | (SEQ ID NO: 918) |
| | (SEQ ID NO: 54) | |
| 25 | CD44 | GTGGGGTTCGGAGGTATA |
| | (SEQ ID NO: 20) | (SEQ ID NO: 919) |
| 26 | CD44 | GTGGGGTTTGGAGGTATA |
| | (SEQ ID NO: 20) | (SEQ ID NO: 920) |
| 27 | EYA4 | AAGTAAGTCGTTGTTGTT |
| | (SEQ ID NO: 24) | (SEQ ID NO: 921) |
| 28 | EYA4 | AAGTAAGTTGTTGTTGTT |
| | (SEQ ID NO: 24) | (SEQ ID NO: 922) |
| 29 | EYA4 | AGTGTATGCGTAGAAGGT |
| | (SEQ ID NO: 24) | (SEQ ID NO: 923) |
| 30 | EYA4 | AGTGTATGTGTAGAAGGT |
| | (SEQ ID NO: 24) | (SEQ ID NO: 924) |
| 31 | GTBP/MSH6 | TTTGTTGGCGGGAAATTT |
| | (SEQ ID NO: 26) | (SEQ ID NO: 925) |
| 32 | GTBP/MSH6 | TTTGTTGGTGGGAAATTT |
| | (SEQ ID NO: 26) | (SEQ ID NO: 926) |
| 33 | EGR4 | GGAGTTTTCGGTATATAT |
| | (SEQ ID NO: 4) | (SEQ ID NO: 927) |
| 34 | EGR4 | GGAGTTTTTGGTATATAT |
| | (SEQ ID NO: 4) | (SEQ ID NO: 928) |
| 35 | CDH1 | TAGTGGCGTCGGAATTGT |
| | (SEQ ID NO: 15) | (SEQ ID NO: 929) |
| 36 | CDH1 | TAGTGGTGTTGGAATTGT |
| | (SEQ ID NO: 15) | (SEQ ID NO: 930) |
| 37 | EGFR | ATTTGGTTCGATTTGGAT |
| | (SEQ ID NO: 23) | (SEQ ID NO: 931) |
| 38 | EGFR | ATTTGGTTTGATTTGGAT |
| | (SEQ ID NO: 23) | (SEQ ID NO: 932) |
| 39 | LKB1 | AGGGAGGTCGTTGGTATT |
| | (SEQ ID NO: 30) | (SEQ ID NO: 933) |
| 40 | LKB1 | AGGGAGGTTGTTGGTATT |
| | (SEQ ID NO: 30) | (SEQ ID NO: 934) |
| 41 | DAPK1 | TTGTTTTTCGGAAATTTG |
| | (SEQ ID NO: 22) | (SEQ ID NO: 935) |
| 42 | DAPK1 | TTGTTTTTTGGAAATTTG |
| | (SEQ ID NO: 22) | (SEQ ID NO: 936) |
| 43 | IGF2 | GATTAGGGCGGGAAATAT |
| | (SEQ ID NO: 29) | (SEQ ID NO: 937) |
| 44 | IGF2 | GATTAGGGTGGGAAATAT |
| | (SEQ ID NO: 29) | (SEQ ID NO: 938) |
| 45 | HLA-F | TATTTGGGCGGGTGAGTG |
| | (SEQ ID NO: 10) | (SEQ ID NO: 939) |
| 46 | HLA-F | TATTTGGGTGGGTGAGTG |
| | (SEQ ID NO: 10) | (SEQ ID NO: 940) |
| 47 | IGF2 | TTGTATGGTCGAGTTTAT |
| | (SEQ ID NO: 29) | (SEQ ID NO: 941) |
| 48 | IGF2 | TTGTATGGTTGAGTTTAT |
| | (SEQ ID NO: 29) | (SEQ ID NO: 942) |
| 49 | N33 | GTTTAGTTAGCGGGTTTT |
| | (SEQ ID NO: 36) | (SEQ ID NO: 943) |
| 50 | N33 | GTTTAGTTAGTGGGTTTT |
| | (SEQ ID NO: 36) | (SEQ ID NO: 944) |
| 51 | CSPG2 | AAAAATTCGCGAGTTTAG |
| | (SEQ ID NO: 21) | (SEQ ID NO: 945) |
| 52 | CSPG2 | AAAAATTTGTGAGTTTAG |
| | (SEQ ID NO: 21) | (SEQ ID NO: 946) |
| 53 | PTEN | TGATGTGGCGGGATTTTT |
| | (SEQ ID NO: 39) | (SEQ ID NO: 947) |
| 54 | PTEN | TGATGTGGTGGGATTTTT |
| | (SEQ ID NO: 39) | (SEQ ID NO: 948) |
| 55 | MLH1 | TTAGGTAGCGGGTAGTAG |
| | (SEQ ID NO: 32) | (SEQ ID NO: 949) |
| 56 | MLH1 | TTAGGTAGTGGGTAGTAG |
| | (SEQ ID NO: 32) | (SEQ ID NO: 950) |
| 57 | GTBP/MSH6 | GAGGAATTCGGGTTTTAG |
| | (SEQ ID NO: 26) | (SEQ ID NO: 951) |
| 58 | GTBP/MSH6 | GAGGAATTTGGGTTTTAG |
| | (SEQ ID NO: 26) | (SEQ ID NO: 952) |
| 59 | CALCA | ATTAGGTTCGTGTTTTAG |
| | (SEQ ID NO: 14) | (SEQ ID NO: 953) |
| 60 | CALCA | ATTAGGTTTGTGTTTTAG |
| | (SEQ ID NO: 14) | (SEQ ID NO: 954) |
| 61 | DAPK1 | GAAGGGAGCGTATTTTAT |
| | (SEQ ID NO: 22) | (SEQ ID NO: 955) |
| 62 | DAPK1 | GAAGGGAGCGTATTTTAT |
| | (SEQ ID NO: 22) | (SEQ ID NO: 956) |
| 63 | PTEN | AGAGTTATCGTTTTGTTT |
| | (SEQ ID NO: 39) | (SEQ ID NO: 957) |
| 64 | PTEN | AGAGTTATTGTTTTGTTT |
| | (SEQ ID NO: 39) | (SEQ ID NO: 958) |
| 65 | WT1 | TGTTATATCGGTTAGTTG |
| | (SEQ ID NO: 9) | (SEQ ID NO: 959) |
| 66 | WT1 | TGTTATATTGGTTAGTTG |
| | (SEQ ID NO: 9) | (SEQ ID NO: 960) |
| 67 | EGFR | TTTGTATTCGGAGTTGGG |
| | (SEQ ID NO: 23) | (SEQ ID NO: 961) |
| 68 | EGFR | TTTGTATTTGGAGTTGGG |
| | (SEQ ID NO: 23) | (SEQ ID NO: 962) |
| 69 | CSPG2 | AAGATTTTCGGTTAGTTT |
| | (SEQ ID NO: 21) | (SEQ ID NO: 963) |
| 70 | CSPG2 | AAGATTTTTGGTTAGTTT |
| | (SEQ ID NO: 21) | (SEQ ID NO: 964) |
| 71 | LKB1 | TTTAGGTTCGTAAGTTTA |
| | (SEQ ID NO: 30) | (SEQ ID NO: 965) |
| 72 | LKB1 | TTTAGGTTTGTAAGTTTA |
| | (SEQ ID NO: 30) | (SEQ ID NO: 966) |
| 73 | WT1 | TATATTGGCGAAGGTTAA |
| | (SEQ ID NO: 9) | (SEQ ID NO: 967) |
| 74 | WT1 | TATATTGGTGAAGGTTAA |
| | (SEQ ID NO: 9) | (SEQ ID NO: 968) |
| 75 | ESR1 | TGGAGGTTCGGGAGTTTA |
| | (SEQ ID NO: 60) | (SEQ ID NO: 969) |
| 76 | ESR1 | TGGAGGTTTGGGAGTTTA |
| | (SEQ ID NO: 60) | (SEQ ID NO: 970) |
| 77 | APC | TTTAATCGTATAGTTTGT |
| | (SEQ ID NO: 12) | (SEQ ID NO: 971) |
| 78 | APC | TTTAATTGTATAGTTTGT |
| | (SEQ ID NO: 12) | (SEQ ID NO: 972) |
| 79 | IGF2 | AGTTTGAACGATGTAAGA |
| | (SEQ ID NO: 29) | (SEQ ID NO: 973) |
| 80 | IGF2 | AGTTTGAATGATGTAAGA |
| | (SEQ ID NO: 29) | (SEQ ID NO: 974) |
| 81 | MYOD1 | AATTAGGTCGGATAGGAG |
| | (SEQ ID NO: 8) | (SEQ ID NO: 975) |
| 82 | MYOD1 | AATTAGGTTGGATAGGAG |
| | (SEQ ID NO: 8) | (SEQ ID NO: 976) |
| 83 | N33 | TTGGTTCGGGAAAGGTAA |
| | (SEQ ID NO: 36) | (SEQ ID NO: 977) |
| 84 | N33 | TTGGTTTGGGAAAGGTAA |
| | (SEQ ID NO: 36) | (SEQ ID NO: 978) |
| 85 | TPEF | ATTTGTTTCGATTAATTT |
| | (= TMEFF2; = HPP1) | (SEQ ID NO: 979) |
| | (SEQ ID NO: 54) | |
| 86 | TPEF | ATTTGTTTTGATTAATTT |
| | (= TMEFF2; = HPP1) | (SEQ ID NO: 980) |
| | (SEQ ID NO: 54) | |
| 87 | CDKN2a | AATAGTTACGGTCGGAGG |
| | (SEQ ID NO: 18) | (SEQ ID NO: 981) |
| 88 | CDKN2a | AATAGTTATGGTTGGAGG |
| | (SEQ ID NO: 18) | (SEQ ID NO: 982) |
| 89 | CDH1 | AGGGTTATCGCGTTTATG |
| | (SEQ ID NO: 15) | (SEQ ID NO: 983) |
| 90 | CDH1 | AGGGTTATTGTGTTTATG |
| | (SEQ ID NO: 15) | (SEQ ID NO: 984) |
| 91 | APC | TATTTTGGCGGGTTGTAT |
| | (SEQ ID NO: 12) | (SEQ ID NO: 985) |
| 92 | APC | TATTTTGGTGGGTTGTAT |
| | (SEQ ID NO: 12) | (SEQ ID NO: 986) |

TABLE 4
Oligonucleotides used in differentiation between
colon carcinoma tissue and healthy colon tissue.

| No: | Gene | Oligo: |
|---|---|---|
| 1 | CDH13 | AATGTTTTCGTGATGTTG |
| | (SEQ ID NO: 50) | (SEQ ID NO: 895) |
| 2 | CDH13 | AATGTTTTTGTGATGTTG |
| | (SEQ ID NO: 50) | (SEQ ID NO: 896) |
| 3 | TPEF | AATTTGCGAACGTTTGGG |
| | (= TMEFF2; = HPP1) | (SEQ ID NO: 899) |
| | (SEQ ID NO: 54) | |
| 4 | TPEF | AATTTGTGAATGTTTGGG |
| | (= TMEFF2; = HPP1) | (SEQ ID NO: 900) |
| | (SEQ ID NO: 54) | |
| 5 | CDH13 | AAGGAATTCGTTTTGTAA |
| | (SEQ ID NO: 50) | (SEQ ID NO: 903) |
| 6 | CDH13 | AAGGAATTTGTTTTGTAA |
| | (SEQ ID NO: 50) | (SEQ ID NO: 904) |
| 7 | CSPG2 | GGGTAACGTCGAATTTAG |
| | (SEQ ID NO: 21) | (SEQ ID NO: 901) |
| 8 | CSPG2 | GGGTAATGTTGAATTTAG |
| | (SEQ ID NO: 21) | (SEQ ID NO: 902) |
| 9 | CD44 | TTGTTTAGCGGATTTTAG |
| | (SEQ ID NO: 20) | (SEQ ID NO: 897) |
| 10 | CD44 | TTGTTTAGTGGATTTTAG |
| | (SEQ ID NO: 20) | (SEQ ID NO: 898) |
| 11 | EYA4 | AGTGTATGCGTAGAAGGT |
| | (SEQ ID NO: 24) | (SEQ ID NO: 923) |
| 12 | EYA4 | AGTGTATGTGTAGAAGGT |
| | (SEQ ID NO: 24) | (SEQ ID NO: 924) |
| 13 | APC | TTTAATCGTATAGTTTGT |
| | (SEQ ID NO: 12) | (SEQ ID NO: 971) |
| 14 | APC | TTTAATTGTATAGTTTGT |
| | (SEQ ID NO: 12) | (SEQ ID NO: 972) |
| 15 | PTGS2 | TTTATTTTCGTGGGTAAA |
| | (SEQ ID NO: 52) | (SEQ ID NO: 913) |
| 16 | PTGS2 | TTTATTTTTGTGGGTAAA |
| | (SEQ ID NO: 52) | (SEQ ID NO: 914) |
| 17 | EYA4 | AAGTAAGTCGTTGTTGTT |
| | (SEQ ID NO: 24) | (SEQ ID NO: 921) |
| 18 | EYA4 | AAGTAAGTTGTTGTTGTT |
| | (SEQ ID NO: 24) | (SEQ ID NO: 922) |
| 19 | PTEN | ATTTTGCGTTCGTATTTA |
| | (SEQ ID NO: 39) | (SEQ ID NO: 987) |
| 20 | PTEN | ATTTTGTGTTTGTATTTA |
| | (SEQ ID NO: 39) | (SEQ ID NO: 988) |
| 21 | GSTP1 | GGAGTTCGCGGGATTTTT |
| | (SEQ ID NO: 25) | (SEQ ID NO: 905) |
| 22 | GSTP1 | GGAGTTTGTGGGATTTTT |
| | (SEQ ID NO: 25) | (SEQ ID NO: 906) |
| 23 | CAV1 | TAGATTCGGAGGTAGGTA |
| | (SEQ ID NO: 49) | (SEQ ID NO: 911) |
| 24 | CAV1 | TAGATTTGGAGGTAGGTA |
| | (SEQ ID NO: 49) | (SEQ ID NO: 912) |
| 25 | EGFR | ATTTGGTTCGATTTGGAT |
| | (SEQ ID NO: 23) | (SEQ ID NO: 931) |
| 26 | EGFR | ATTTGGTTTGATTTGGAT |
| | (SEQ ID NO: 23) | (SEQ ID NO: 932) |
| 27 | N33 | TGTTATTTCGGAGGGTTT |
| | (SEQ ID NO: 36) | (SEQ ID NO: 909) |
| 28 | N33 | TGTTATTTTGGAGGGTTT |
| | (SEQ ID NO: 36) | (SEQ ID NO: 910) |
| 29 | IGF2 | TTGTATGGTCGAGTTTAT |
| | (SEQ ID NO: 29) | (SEQ ID NO: 941) |
| 30 | IGF2 | TTGTATGGTTGAGTTTAT |
| | (SEQ ID NO: 29) | (SEQ ID NO: 942) |
| 31 | HLA-F | AGTTGTTTCGTAGATATT |
| | (SEQ ID NO: 10) | (SEQ ID NO: 989) |
| 32 | HLA-F | AGTTGTTTTGTAGATATT |
| | (SEQ ID NO: 10) | (SEQ ID NO: 990) |
| 33 | TPEF | ATAGGTTACGGGTTGGAG |
| | (= TMEFF2; = HPP1) | (SEQ ID NO: 917) |
| | (SEQ ID NO: 54) | |
| 34 | TPEF | ATAGGTTATGGGTTGGAG |
| | (= TMEFF2; = HPP1) | (SEQ ID NO: 918) |
| | (SEQ ID NO: 54) | |
| 35 | TP73 | AAGTTACGGGTTTTATTG |
| | (SEQ ID NO: 46) | (SEQ ID NO: 915) |
| 36 | TP73 | AAGTTATGGGTTTTATTG |
| | (SEQ ID NO: 46) | (SEQ ID NO: 916) |

TABLE 5
Oligonucleotides used in differentiation between
colon adenoma tissue and healthy colon tissue.

| No: | Gene | Oligo: |
|---|---|---|
| 1 | CD44 | TTGTTTAGCGGATTTTAG |
| | (SEQ ID NO: 20) | (SEQ ID NO: 897) |
| 2 | CD44 | TTGTTTAGTGGATTTTAG |
| | (SEQ ID NO: 20) | (SEQ ID NO: 898) |
| 3 | HLA-F | TATTTGGGCGGGTGAGTG |
| | (SEQ ID NO: 10) | (SEQ ID NO: 939) |
| 4 | HLA-F | TATTTGGGTGGGTGAGTG |
| | (SEQ ID NO: 10) | (SEQ ID NO: 940) |
| 5 | TGFBR2 | AAAGTTTTCGGAGGGGTT |
| | (SEQ ID NO: 43) | (SEQ ID NO: 907) |
| 6 | TGFBR2 | AAAGTTTTTGGAGGGGTT |
| | (SEQ ID NO: 43) | (SEQ ID NO: 908) |
| 7 | GTBP/MSH6 | GAGGAATTCGGGTTTTAG |
| | (SEQ ID NO: 26) | (SEQ ID NO: 951) |
| 8 | GTBP/MSH6 | GAGGAATTTGGGTTTTAG |
| | (SEQ ID NO: 26) | (SEQ ID NO: 952) |
| 9 | GTBP/MSH6 | TTTGTTGGCGGGAAATTT |
| | (SEQ ID NO: 26) | (SEQ ID NO: 925) |
| 10 | GTBP/MSH6 | TTTGTTGGTGGGAAATTT |
| | (SEQ ID NO: 26) | (SEQ ID NO: 926) |
| 11 | LKB1 | AGGGAGGTCGTTGGTATT |
| | (SEQ ID NO: 30) | (SEQ ID NO: 933) |
| 12 | LKB1 | AGGGAGGTTGTTGGTATT |
| | (SEQ ID NO: 30) | (SEQ ID NO: 934) |
| 13 | CD44 | GTGGGGTTCGGAGGTATA |
| | (SEQ ID NO: 20) | (SEQ ID NO: 919) |
| 14 | CD44 | GTGGGGTTTGGAGGTATA |
| | (SEQ ID NO: 20) | (SEQ ID NO: 920) |
| 15 | N33 | GTTTAGTTAGCGGGTTTT |
| | (SEQ ID NO: 36) | (SEQ ID NO: 943) |
| 16 | N33 | GTTTAGTTAGTGGGTTTT |
| | (SEQ ID NO: 36) | (SEQ ID NO: 944) |
| 17 | CDH13 | AATGTTTTCGTGATGTTG |
| | (SEQ ID NO: 50) | (SEQ ID NO: 895) |
| 18 | CDH13 | AATGTTTTTGTGATGTTG |
| | (SEQ ID NO: 50) | (SEQ ID NO: 896) |
| 19 | TP73 | AAGTTACGGGTTTTATTG |
| | (SEQ ID NO: 46) | (SEQ ID NO: 915) |
| 20 | TP73 | AAGTTATGGGTTTTATTG |
| | (SEQ ID NO: 46) | (SEQ ID NO: 916) |
| 21 | PTEN | TGATGTGGCGGGATTTTT |
| | (SEQ ID NO: 39) | (SEQ ID NO: 947) |
| 22 | PTEN | TGATGTGGTGGGATTTTT |
| | (SEQ ID NO: 39) | (SEQ ID NO: 948) |
| 23 | N33 | TGTTATTTCGGAGGGTTT |
| | (SEQ ID NO: 36) | (SEQ ID NO: 909) |
| 24 | N33 | TGTTATTTTGGAGGGTTT |
| | (SEQ ID NO: 36) | (SEQ ID NO: 910) |
| 25 | TPEF | AATTTGCGAACGTTTGGG |
| | (= TMEFF2; = HPP1) | (SEQ ID NO: 899) |
| | (SEQ ID NO: 54) | |
| 26 | TPEF | AATTTGTGAATGTTTGGG |
| | (= TMEFF2; = HPP1) | (SEQ ID NO: 900) |
| | (SEQ ID NO: 54) | |
| 27 | GSTP1 | GGAGTTCGCGGGATTTTT |
| | (SEQ ID NO: 25) | (SEQ ID NO: 905) |
| 28 | GSTP1 | GGAGTTTGTGGGATTTTT |
| | (SEQ ID NO: 25) | (SEQ ID NO: 906) |
| 29 | EGFR | TTTGTATTCGGAGTTGGG |
| | (SEQ ID NO: 23) | (SEQ ID NO: 961) |
| 30 | EGFR | TTTGTATTTGGAGTTGGG |
| | (SEQ ID NO: 23) | (SEQ ID NO: 962) |
| 31 | RARB | TAGTAGTTCGGGTAGGGT |
| | (SEQ ID NO: 40) | (SEQ ID NO: 991) |
| 32 | RARB | TAGTAGTTTGGGTAGGGT |
| | (SEQ ID NO: 40) | (SEQ ID NO: 992) |
| 33 | N33 | Al 1TAGTTCGGGGGAGGA |
| | (SEQ ID NO: 36) | (SEQ ID NO: 993) |
| 34 | N33 | ATTTAGTTTGGGGGAGGA |
| | (SEQ ID NO: 36) | (SEQ ID NO: 994) |
| 35 | CAV1 | TAGATTCGGAGGTAGGTA |
| | (SEQ ID NO: 49) | (SEQ ID NO: 911) |
| 36 | CAV1 | TAGATTTGGAGGTAGGTA |
| | (SEQ ID NO: 49) | (SEQ ID NO: 912) |
| 37 | TPEF | ATAGGTTACGGGTTGGAG |
| | (= TMEFF2; = HPP1) | (SEQ ID NO: 917) |
| | (SEQ ID NO: 54) | |
| 38 | TPEF | ATAGGTTATGGGTTGGAG |
| | (= TMEFF2; = HPP1) | (SEQ ID NO: 918) |
| | (SEQ ID NO: 54) | |
| 39 | CDKN2a | AATAGTTACGGTCGGAGG |
| | (SEQ ID NO: 18) | (SEQ ID NO: 981) |
| 40 | CDKN2a | AATAGTTATGGTTGGAGG |
| | (SEQ ID NO: 18) | (SEQ ID NO: 982) |
| 41 | N33 | TTGGTTCGGGAAAGGTAA |
| | (SEQ ID NO: 36) | (SEQ ID NO: 977) |
| 42 | N33 | TTGGTTTGGGAAAGGTAA |
| | (SEQ ID NO: 36) | (SEQ ID NO: 978) |
| 43 | MLH1 | TTAGGTAGCGGGTAGTAG |
| | (SEQ ID NO: 32) | (SEQ ID NO: 949) |
| 44 | MLH1 | TTAGGTAGTGGGTAGTAG |
| | (SEQ ID NO: 32) | (SEQ ID NO: 950) |
| 45 | APC | TATTTTGGCGGGTTGTAT |
| | (SEQ ID NO: 12) | (SEQ ID NO: 985) |
| 46 | APC | TATTTTGGTGGGTTGTAT |
| | (SEQ ID NO: 12) | (SEQ ID NO: 986) |
| 47 | CSPG2 | GGGTAACGTCGAATTTAG |
| | (SEQ ID NO: 21) | (SEQ ID NO: 901) |
| 48 | CSPG2 | GGGTAATGTTGAATTTAG |
| | (SEQ ID NO: 21) | (SEQ ID NO: 902) |
| 49 | CDH1 | TAGTGGCGTCGGAATTGT |
| | (SEQ ID NO: 15) | (SEQ ID NO: 929) |
| 50 | CDH1 | TAGTGGTGTTGGAATTGT |
| | (SEQ ID NO: 15) | (SEQ ID NO: 930) |
| 51 | PTGS2 | TTTATTTTCGTGGGTAAA |
| | (SEQ ID NO: 52) | (SEQ ID NO: 913) |
| 52 | PTGS2 | TTTATTTTTGTGGGTAAA |
| | (SEQ ID NO: 52) | (SEQ ID NO: 914) |
| 53 | RASSF1 | TTTGTAGCGGGTGGAGTA |
| | (SEQ ID NO: 62) | (SEQ ID NO: 995) |
| 54 | RASSF1 | TTTGTAGTGGGTGGAGTA |
| | (SEQ ID NO: 62) | (SEQ ID NO: 996) |
| 55 | WT1 | TATATTGGCGAAGGTTAA |
| | (SEQ ID NO: 9) | (SEQ ID NO: 967) |
| 56 | WT1 | TATATTGGTGAAGGTTAA |
| | (SEQ ID NO: 9) | (SEQ ID NO: 968) |
| 57 | CDKN2a | GGAGTTTTCGGTTGATTG |
| | (SEQ ID NO: 18) | (SEQ ID NO: 997) |
| 58 | CDKN2a | GGAGTTTTTGGTTGATTG |
| | (SEQ ID NO: 18) | (SEQ ID NO: 998) |
| 59 | ESR1 | TGGAGGTTCGGGAGTTTA |
| | (SEQ ID NO: 60) | (SEQ ID NO: 969) |
| 60 | ESR1 | TGGAGGTTTGGGAGTTTA |
| | (SEQ ID NO: 60) | (SEQ ID NO: 970) |
| 61 | IGF2 | GATTAGGGCGGGAAATAT |
| | (SEQ ID NO: 29) | (SEQ ID NO: 937) |
| 62 | IGF2 | GATTAGGGTGGGAAATAT |
| | (SEQ ID NO: 29) | (SEQ ID NO: 938) |
| 63 | MYOD1 | AATTAGGTCGGATAGGAG |
| | (SEQ ID NO: 8) | (SEQ ID NO: 975) |
| 64 | MYOD1 | AATTAGGTTGGATAGGAG |
| | (SEQ ID NO: 8) | (SEQ ID NO: 976) |
| 65 | CDH13 | AAGGAATTCGTTTTGTAA |
| | (SEQ ID NO: 50) | (SEQ ID NO: 903) |
| 66 | CDH13 | AAGGAATTTGTTTTGTAA |
| | (SEQ ID NO: 50) | (SEQ ID NO: 904) |
| 67 | EGR4 | GGAGTTTTCGGTATATAT |
| | (SEQ ID NO: 4) | (SEQ ID NO: 927) |
| 68 | EGR4 | GGAGTTTTTGGTATATAT |
| | (SEQ ID NO: 4) | (SEQ ID NO: 928) |
| 69 | S100A2 | TATGTATACGAGTATTGG |
| | (SEQ ID NO: 42) | (SEQ ID NO: 999) |
| 70 | S100A2 | TATGTATATGAGTATTGG |
| | (SEQ ID NO: 42) | (SEQ ID NO: 1000) |
| 71 | DAPK1 | TTGTTTTTCGGAAATTTG |
| | (SEQ ID NO: 22) | (SEQ ID NO: 935) |
| 72 | DAPK1 | TTGTTTTTTGGAAATTTG |
| | (SEQ ID NO: 22) | (SEQ ID NO: 936) |
| 73 | MGMT | AGTAGGATCGGGATTTTT |
| | (SEQ ID NO: 31) | (SEQ ID NO: 1001) |
| 74 | MGMT | AGTAGGATTGGGATTTTT |
| | (SEQ ID NO: 31) | (SEQ ID NO: 1002) |
| 75 | EYA4 | AAGTAAGTCGTTGTTGTT |
| | (SEQ ID NO: 24) | (SEQ ID NO: 921) |
| 76 | EYA4 | AAGTAAGTTGTTGTTGTT |
| | (SEQ ID NO: 24) | (SEQ ID NO: 922) |
| 77 | CEA | AAGTGTTCGCGGTTGTTT |
| | (SEQ ID NO: 56) | (SEQ ID NO: 1003) |
| 78 | CEA | AAGTGTTTGTGGTTGTTT |
| | (SEQ ID NO: 56) | (SEQ ID NO: 1004) |
| 79 | WT1 | TGTTATATCGGTTAGTTG |
| | (SEQ ID NO: 9) | (SEQ ID NO: 959) |
| 80 | WT1 | TGTTATATTGGTTAGTTG |
| | (SEQ ID NO: 9) | (SEQ ID NO: 960) |
| 81 | GPIb beta | GGAGTTCGGTCGGGTTTT |
| | (SEQ ID NO: 7) | (SEQ ID NO: 1005) |
| 82 | GPIb beta | GGAGTTTGGTTGGGTHT |
| | (SEQ ID NO: 7) | (SEQ ID NO: 1006) |
| 83 | CALCA | ATTAGGTTCGTGTTTTAG |
| | (SEQ ID NO: 14) | (SEQ ID NO: 953) |
| 84 | CALCA | ATTAGGTTTGTGTTTTAG |
| | (SEQ ID NO: 14) | (SEQ ID NO: 954) |
| 85 | PTGS2 | AGTTATTTCGTTATATGG |
| | (SEQ ID NO: 52) | (SEQ ID NO: 1007) |
| 86 | PTGS2 | AGTTATTTTGTTATATGG |
| | (SEQ ID NO: 52) | (SEQ ID NO: 1008) |
| 87 | MYOD1 | GTGTTAGTCGTTTAGGGT |
| | (SEQ ID NO: 8) | (SEQ ID NO: 1009) |
| 88 | MYOD1 | GTGTTAGTTGTTTAGGGT |
| | (SEQ ID NO: 8) | (SEQ ID NO: 1010) |
| 89 | EYA4 | AGTGTATGCGTAGAAGGT |
| | (SEQ ID NO: 24) | (SEQ ID NO: 923) |
| 90 | EYA4 | AGTGTATGTGTAGAAGGT |
| | (SEQ ID NO: 24) | (SEQ ID NO: 924) |
| 91 | CSPG2 | AAAAATTCGCGAGTTTAG |
| | (SEQ ID NO: 21) | (SEQ ID NO: 945) |
| 92 | CSPG2 | AAAAATTTGTGAGTTTAG |
| | (SEQ ID NO: 21) | (SEQ ID NO: 946) |
| 93 | PGR | TTAAGTGTCGGATTTGTG |
| | (SEQ ID NO: 38) | (SEQ ID NO: 1011) |
| 94 | PGR | TTAAGTGTTGGATTTGTG |
| | (SEQ ID NO: 38) | (SEQ ID NO: 1012) |
| 95 | PCNA | TAAAGAGGCGGGGAGATT |
| | (SEQ ID NO: 58) | (SEQ ID NO: 1013) |
| 96 | PCNA | TAAAGAGGTGGGGAGATT |
| | (SEQ ID NO: 58) | (SEQ ID NO: 1014) |
| 97 | MSH3 | AGTATTTTCGTTTGAGGA |
| | (SEQ ID NO: 34) | (SEQ ID NO: 1015) |
| 98 | MSH3 | AGTATTTTTGTTTGAGGA |
| | (SEQ ID NO: 34) | (SEQ ID NO: 1016) |
| 99 | WT1 | TAGTGAGACGAGGTTTTT |
| | (SEQ ID NO: 9) | (SEQ ID NO: 1017) |
| 100 | WT1 | TAGTGAGATGAGGTHTT |
| | (SEQ ID NO: 9) | (SEQ ID NO: 1018) |
| 101 | MYC | TTATAATGCGAGGGTTTG |
| | (SEQ ID NO: 35) | (SEQ ID NO: 1019) |
| 102 | MYC | TTATAATGTGAGGGTTTG |
| | (SEQ ID NO: 35) | (SEQ ID NO: 1020) |
| 103 | HIC-1 | TTTTAGAGCGTTAGGGTT |
| | (SEQ ID NO: 27) | (SEQ ID NO: 1021) |
| 104 | HIC-1 | TTTTAGAGTGTTAGGGTT |
| | (SEQ ID NO: 27) | (SEQ ID NO: 1022) |
| 105 | PTGS2 | ATATTTGGCGGAAATTTG |
| | (SEQ ID NO: 52) | (SEQ ID NO: 1023) |
| 106 | PTGS2 | ATATTTGGTGGAAATTTG |
| | (SEQ ID NO: 52) | (SEQ ID NO: 1024) |
| 107 | EGFR | ATTTGGTTCGATTTGGAT |
| | (SEQ ID NO: 23) | (SEQ ID NO: 931) |
| 108 | EGFR | ATTTGGTTCGATTTGGAT |
| | (SEQ ID NO: 23) | (SEQ ID NO: 932) |
| 109 | LKB1 | TTTAGGTTCGTAAGTTTA |
| | (SEQ ID NO: 30) | (SEQ ID NO: 965) |
| 110 | LKB1 | TTTAGGTTTGTAAGTTTA |
| | (SEQ ID NO: 30) | (SEQ ID NO: 966) |
| 111 | IGF2 | TTGTATGGTCGAGTTTAT |
| | (SEQ ID NO: 29) | (SEQ ID NO: 941) |
| 112 | IGF2 | TTGTATGGTTGAGTTTAT |
| | (SEQ ID NO: 29) | (SEQ ID NO: 942) |
| 113 | PTEN | AGAGTTATCGTTTTGTTT |
| | (SEQ ID NO: 39) | (SEQ ID NO: 957) |
| 114 | PTEN | AGAGTTATTGTTTTGTTT |
| | (SEQ ID NO: 39) | (SEQ ID NO: 958) |
| 115 | BCL2 | TTTTGTTACGGTGGTGGA |
| | (SEQ ID NO: 13) | (SEQ ID NO: 1025) |
| 116 | BCL2 | TTTTGTTATGGTGGTGGA |
| | (SEQ ID NO: 13) | (SEQ ID NO: 1026) |
| 117 | AR | AGAGGTTGCGTTTTAGAG |
| | (SEQ ID NO: 5) | (SEQ ID NO: 1027) |
| 118 | AR | AGAGGTTGTGTTTTAGAG |
| | (SEQ ID NO: 5) | (SEQ ID NO: 1028) |
| 119 | CDH1 | AGGGTTATCGCGTTTATG |
| | (SEQ ID NO: 15) | (SEQ ID NO: 983) |
| 120 | CDH1 | AGGGTTATTGTGTTTATG |
| | (SEQ ID NO: 15) | (SEQ ID NO: 984) |

TABLE 6
Oligonucleotides used in differentiation between
colon carcinoma tissue and colon adenoma tissue.

| No: | Gene | Oligo: |
|---|---|---|
| 1 | CDKN2a | GTTGTTTTCGGTTGGTGT |
| | (SEQ ID NO: 18) | (SEQ ID NO: 1029) |
| 2 | CDKN2a | GTTGTTTTTGGTTGGTGT |
| | (SEQ ID NO: 18) | (SEQ ID NO: 1030) |
| 3 | GPIb beta | GGAGTTCGGTCGGGTTTT |
| | (SEQ ID NO: 7) | (SEQ ID NO: 1005) |
| 4 | GPIb beta | GGAGTTTGGTTGGGTTTT |
| | (SEQ ID NO: 7) | (SEQ ID NO: 1006) |

TABLE 7
Crossreference table to relate numbers used in figure labelling to ID
numbers used throughout the document

| | |
|---|---|
| Number in FIGS. | Gene name |

Healthy vs Non-Healthy

| | |
|---|---|
| 50-D | CDH13 |
| 20-C | CD44 |
| 54-C | TPEF (=TMEFF2; =HPP1) |
| 21-C | CSPG2 |
| 50-C | CDH13 |
| 25-B | GSTP1 |
| 43-C | TGFBR2 |
| 36-B | N33 |
| 49-A | CAV1 |
| 52-C | PTGS2 |
| 46-A | TP73 |
| 54-B | TPEF (=TMEFF2; =HPP1) |
| 20-A | CD44 |
| 24-D | EYA4 |
| 24-B | EYA4 |
| 26-B | GTBP/MSH6 |
| 4-C | EGR4 |
| 15-E | CDH1 |
| 23-E | EGFR |
| 30-B | LKB1 |
| 22-D | DAPK1 |
| 29-D | IGF2 |
| 10-A | HLA-F |
| 29-C | IGF2 |
| 36-C | N33 |
| 21-D | CSPG2 |
| 39-D | PTEN |
| 32-B | MLH1 |
| 26-A | GTBP/MSH6 |
| 14-C | CALCA |
| 22-C | DAPK1 |
| 39-C | PTEN |
| 9-D | WT1 |
| 23-A | EGFR |
| 21-A | CSPG2 |
| 30-A | LKB1 |
| 9-C | WT1 |
| 60-E | ESR1 |
| 12-A | APC |
| 29-A | IGF2 |
| 8-D | MYOD1 |
| 36-A | N33 |
| 54-A | TPEF (=TMEFF2; =HPP1) |
| 18-E | CDKN2a |
| 15-D | CDH1 |
| 12-C | APC |

Healthy vs Carcinoma

| | |
|---|---|
| 50-D | CDH13 |
| 54-C | TPEF (=TMEFF2; =HPP1) |
| 50-C | CDH13 |
| 21-C | CSPG2 |
| 20-C | CD44 |
| 24-B | EYA4 |
| 12-A | APC |
| 52-C | PTGS2 |
| 24-D | EYA4 |
| 39-B | PGR |
| 25-B | GSTP1 |
| 49-A | CAV1 |
| 23-E | EGFR |
| 36-B | N33 |
| 29-C | IGF2 |
| 10-D | HLA-F |
| 54-B | TPEF (=TMEFF2; =HPP1) |
| 46-A | TP73 |

Healthy vs Adenoma

| | |
|---|---|
| 20-C | CD44 |
| 10-A | HLA-F |
| 43-C | TGFBR2 |
| 26-A | GTBP/MSH6 |
| 26-B | GTBP/MSH6 |
| 30-B | LKB1 |
| 20-A | CD44 |
| 36-C | N33 |
| 50-D | CDH13 |
| 46-A | TP73 |
| 39-D | PTEN |
| 36-B | N33 |
| 54-C | TPEF (=TMEFF2; =HPP1) |
| 25-B | GSTP1 |
| 23-A | EGFR |
| 40-A | RARB |
| 36-D | N33 |
| 49-A | CAV1 |
| 54-B | TPEF (=TMEFF2; =HPP1) |
| 18-E | CDKN2a |
| 36-A | N33 |
| 32-B | MLH1 |
| 12-C | APC |
| 21-C | CSPG2 |
| 15-E | CDH1 |
| 52-C | PTGS2 |
| 62-D | RASSF1 |
| 9-C | WT1 |
| 18-D | CDKN2a |
| 60-E | ESR1 |
| 29-D | IGF2 |
| 8-D | MYOD1 |
| 50-C | CDH13 |
| 4-C | EGR4 |
| 42-C | S100A2 |
| 22-D | DAPK1 |
| 31-E | MGMT |
| 24-D | EYA4 |
| 56-A | CEA |
| 9-D | WT1 |
| 7-E | GPIb beta |
| 14-C | CALCA |
| 52-D | PTGS2 |
| 8-B | MYOD1 |
| 24-B | EYA4 |
| 21-D | CSPG2 |
| 38-C | PGR |
| 58-A | PCNA |
| 34-D | MSH3 |
| 9-B | WT1 |
| 35-B | MYC |
| 27-C | HIC-1 |
| 52-B | PTGS2 |
| 23-E | EGFR |
| 30-A | LKB1 |
| 29-C | IGF2 |
| 39-C | PTEN |
| 13-D | BCL2 |
| 5-B | AR |
| 15-D | CDH1 |

Carcinoma vs Adenoma

| | |
|---|---|
| 18-B | CDKN2a |
| 7-E | GPIb beta |

The application's sequence listing, which the Patent Office published only in electronic form, follows.

SEQUENCE LISTING (1028 sequences)

SEQ ID NO: 1 - DNA, 2932 bp, Homo Sapiens
gccaagaacaaaatatatcaagataaggaaaatttgtagtcaagaatagaaaaaaattatggctttgaagtatgagttatttaaagaaagtggaaacatcctcagactatgcagtaaaaaacaaagtgattttcttcttctaaacttatgcaataaactgataggtaatatgtgaaagtcatagaatgtagactagaggatacaacaaacctatttcctctatgttcataagaagtaagaaaagctctgatgtgagttagcattgctttacaattttgaattgtgcagattgcacgtacttttcctcagtttgaagtaaatagtggacaggaaaaaatattaaatgttggcagtaaatatggaaggaaattacaactaatgtaatatgctaaaacatgctatgtttattttactaatttgaattaaaatgtaagaatttaaaatgccctggaaaaacacgggcattgatctgacgtctgaagttttaaaatattacacactttgaaatagcatttgtaccttgaaatacctgtctctatatattttttaaaacttcctttttctttcattccatttatcatcaaataaaggatgaacagatgtaactcagaaactgtcaagcatgctgaagaaagaccactgcagaaaaatttctcctagccttttcaaaggtgttaggaagcagaaaggtgatacagaattggagaggtcggagtttttgtattaactgtattaaatgcgaatcccgagaaaatttcccttaactacgtcctgtagttatatggatatgaagacttatgtgaactttgaaagacgtgtctacataagttgaaatgtccccaatgattcagctgatgcgcgtttctctacttgccctttctagagaggtgcaacggaagccagaacattcctcctggaaattcaacctgtttcgcagtttctcgaggaatcagcattcagtcaatccgggccgggagcagtcatctgtggtgaggctgattggctgggcaggaacagcgccggggcgtgggctgagcacagccgcttcgctctctttgccacaggaagcctgagctcattcgagtagcggctcttccaagctcaaagaagcagaggccgctgttcgtttcctttaggtctttccactaaagtcggagtatcttcttccaaaatttcacgtcttggtggccgttccaaggagcgcgaggtaggggcacgcaaagctgggagctactatgggacagttcccaagtgtcaggctttcagatttcctgaacttggtcttcacgggagaagggcttcttgaggcgtggatagtgtgaagtcctctggcaagtccatggggaccaagtggggttagatctagactcaggagctcctggagcagcgcccaaaccgtagtggcactggaccatgttgcccggagcgcgcacagcccgcgcggtgcggggacctgctctctgagcccgcgggcggtgggtgggaggaagcatcgtccgcggcgactggaaccgggagggagaatcgcactggcggcgggcaaagtccagaacgcgctgccagacccccaactctgccttcgtggagatgctggagaccccgcgcacaggaaagcccctgcagtgcccatcgcggccagagcagctggggcatcaacggcgggcgctccctcttactgctctctggcttcgacgggggactagaggttagtctcacctccagcgcgcctgaggctcatgcatttggctaatgagctgcggtttctcttcaggtcgggatggatcttgaaggggaccgcaatggaggagcaaagaagaagaacttttttaaactgaacaataaaaggtaactagcttgtttcattttcatagtttacatagttgcgagatttgagtaatttatttctagcctccagctctgaaataaatgacatgttgttgtttttaattatttttaagaaacgcaagctagcctttggaatcaatatccctgcttagagcagaagtttgttggctgagtggagcacagcatatgcattttccctgtcttttttgttctttcttttaatgatacataatattttacatatttatgaaatggggtacatggaagcgttttttacatgcccggaatgtgtaatgatcaagtccgggtatttgaaggatacatcaccttaggtatatttcatttctatgtgttgataacattttaagtcttctagctactttgaaatatacaatatattgctaactgtagtcaccctcgtctgctatcgaacattggaacttatttgtcctatccaaccgttcttagtcattcaccaacctcttttcatttcacctttttacccttcccggcctctttcccttagtcttggtgtgcctctttctcagctttcctgccccagacaggcggatgctcatatgtgtttctgtcttatgaacttctgcttttcaagtggtgttggtcgcccacacgtgagccatatgctgctggtgatctgctctgtggtccaggctcttgcttccggtaaatggctatgtaaacatcgcgtttgtggcctggctgatgagacagaaggtcaaaagtacatttaggttgttaactggcaataaatatctgtatataatattggtaatgtaatcatatagggaaaataattatttaaagtaaattttgatcatggtgctctgcctttatagaatatttaaaacttcactaaatagattcattgttagtagtaaattgtaaaatagactagtaagtttaataatattagaaactgtaatgtaaattataagataaattagctaaacacattaatattataagaaaccaagcttttcagtgtaagagaaaaaatacaaatgtggaaatcaaatacatttttaaaaataatgttaagtttgaattagaaatttcaatatgaatt

SEQ ID NO: 2 - DNA, 7432 bp, Homo Sapiens
atctgaagccagagtcacccagaggagaaagagttggaattgagaactcaaggaatgcttggaagtgatcgggctcgagcccacctaggaagaaacagaggctggagacatgagactgtgttgctatttcctctcatcaacccttgggccctattgaggccctaccacaagcctggccctgcagcccagtgactaggagaaattagacacaagataataataacagcaatgatcttttttttttttctgagacggagtcttgctctttcgcccaggctggactgcagtggcgcgatctcggctcaatgcaagctccacctcccaggttcacgccattctcctgcctcagcctcccgagtagctaggactacaggcgcctgccaccacgcctggctaatttttcatatttttagtagagatggggtttcaccgtgttagccaagatggtctcaatctcctgacctcgtgatccgcctgcctcggcctcccaaagtgttggggttacaggcatgagccaccgcgcctggccaacagcaatgatctttgagcacctatattgccagtctccacggtaagagctttcttcattttttgttttgttttgtttcaagacagagtcttgctctgtcacccaggctggagtgcagtggtgtgatcgcggctcactgcagccttcacttcccgggttcaagccattctcctgcctcagcctcccaagtagctgggattacaggcacgcatcactacttctggctaatttttgtatttttagtagggacagggtttttcaccatgttggccaggttggtctcaaactcctggcctcatatgatctgcccacctcggcctcccaaagtgctgggattacaggcgtgagccactgcgcctttctttgtatttgttcaagtaatatactgaaatatgtactgtgcctcccactttatggaggaggaaactgaggccagcaaatgaggctgtcatgggaggtggagacaggatttgaacctgcctcagtgcaggaggctcaagagcctctgtcttctctcagggcactgtgtgggagggtgagaaggagggaggcccacagaggcatgacctctgattgccactgtcacctgggccctgctctctgaagtctctgccaagcggggaggtggccgggggagggccctgctctgtgcagcctcccctcccccggcccgcagagttgagcacagagggacagaggcacggaacccccagaaatgtccctcctcagaaacaggctccaggccctgcctgccctgtgcctctgcgtgctggtcctggcctgcattgggggtgagaagaagtgggtggagggatgtggggcccacacctggtgggtgtgagtgtggctgtgtgtcctgtggctctgtagccacgtgagacatgagtacggagtgtgtgcgtttcatggcgtgcgtatgcatgtgcgtgtcggggagtgtgtgtgtcggtggctgagagtgaagtgtgaatgtcacattggtacaaactgggatcatctgtgtgtgtgcacgtgcgtgcgtggaagtgggagtatgcagtcgtggtaaaaaagtgcatgtctgtgtgcatatgtgtatttgtgtgcacctgtctctctgtggggtatgtgtgtgcaaaatatttgagtgtgtggacatgtgtgagggggtgagtgtgtgctggtgtgtacgtctgtgttttgcatatgcatttttttttttttttttgagacggagtctcactctgtcacccaggctggagtgcagtggtagcagtggtgcgatcttggctcactgcatcatccgcctacccgtttcaagggattctcctgcctcagtcttcagagtatttgggactacagacacacgccaccatgcctggctattttttttttttgagacggagtctcgctctgttacccaggctggagtgcagtggcgtgatcttggctcactgcaacgtccgcctcccgggttcacgccattctcctgcctcagcctcccgagtagctgggactacaggagcccaccaccacgcctggctaattttttgtatttttactagagacggggtttcgccgtgttagccaggatggtctccatatcctgacctcgtgatccgcctgcctcggccttccaaagtgctaggattataggcgtgagccactgcgcctggccaatgcctggctaatttttttatatttttggtagagacagggttttgccatgttgcccaggctggtcttgaaatcctgacctcaggtgatccgcccgccttggcctcccaaagtgctgggattacaggcatgagccaccacgcccggccatgtactttatgttaaaatgggatcatattctagatcagcattatccagtagaaatttaaatttttaatacagggccaggcacggtggctcatgcctgtaatcccagcactttcggaggccgaggcgggtggatcgcaaggtcaggagatttgagatcatcctggctaacagatgggtaaaaacccatctctactaaaaatacaaaaaattagccatgcatggtggcatgcgcctgtagtcccagctactcgggaggctgaggccggagaatcacttgaacccgggaggcagaggttgcagtgagccgagatcgcgccactgcattccaacctgggtgacagagcgagactccgtctgaaaaaaaaaaaaaatttaacacgtatgtagacaatgtgcaaggcaccattccatgtgcatcgtatgtagtaactcttaattctcacgataaccctgaggtagatattattaccccgttctacaaaaggagaaacagtcctggggagacaggataagtcaccggccaaggcacacagctagctacatgtggcccccgcgtgacggctggtctctgtaggcgaggctttgtccagatgcgtgggtagaaggtctggcccggaaagaggaactgacagcaaggctaagccaatgtctgcccctgggggcagaaagtcacctcctgctctccctccactgtccacagaggtagctcagacagggtgggggtcacaggagaacgaagggagaagggggtagttcctgggcagcaaaatcaggtggtgaagggaggcatcagaggatggcaattagagaggccattagaggggaaccacaggcagacagggtgacaggagggactactgacacaaggtgaagagatggcccagccggacggggtggctcacatctgtaatcccagcattttgggagcccgaggtgggtggatcacttgaggtcaggagttcgaggccccaacatggcaaaaccccatctcttctaaaaatacaaaaattagccgggcatgatggcagatgcctgtaatccctgctactcgggaggctgaggcaggaaaattgcctgaatccaggaggtggaggttgcaatgagacgagatcatgacactgcactccaccctgggcaacagagcaagagactgactctgtctcataaaaaaaaagaaaaaagaaaaaaaaaaagagatggctgatggttaaagaggggttagcggtcaggggacacataagggtaaaggcaggaggcaagaggactggcagggggctgcccctgggccaccgggagcgacacaggatgagcatggagggaaagggagaaggggattctagggtcccagcctacccaagttgccctctggttccacctagcatgccagccagaggcccaggaaggaaccctgagccccccaccaaagctaaagatgagtcgctggagcctggtgaggggcaggatgaaggagctgctggagacagtggtgaacaggaccagagacgggtggcaatggttctggtgagggtgtgctgggctgggtggtgggaggggactcctgggtctgagggaggaggggctggggcctggacccctgagtctcagggaggaggaaagggtgggagtggggctgtgacccctaggtctgggaggagtggagggttagagctgagagcaggaactcctaggtcacagagaggagcggataaatggggcagagaacacctggggagagctggggcctccactgtgatgtcctctctcctgtaggagcccgagcaccttccggggcttcatgcagacctactatgacgaccacctgagggacctgggtccgctcaccaaggcctggttcctcgaatccaaagacagcctcttgaagaagacccacagcctgtgccccaggcttgtctgtggggacaaggaccagggttaaaatgttcataaaagccaggtgtggttgtggcgggtgcctgtagtcccagctactcaggaggctgaggtaggatgatggcttgagcccaggagttcgagaccagcctgggcaacacagcgagatctcttgggggtaaaacaaaaagaaaaaaaaaagttcatacttctccaataaataaagtctcacctgtgtccctgtctggatccttccccagtgtggccagaaaaaaacccaccccactgcctcccaggaatcaatgagtagaagaggtgacacctgatggggaaggaagagtagggaggtcgggaagggtatcaaggaataacaccctattgtgggcttgcggagaatgggggacttcaaggcgtgtcagtttcaggagggtgagggcaggagcgtgggtggagtcagcaggtccccatgatggccctcactgagagcttcgcccttgtctcctacaagctctgactccattcccagtgggcacccagcacctccaacccctccacagcccccaacccagcctctgtcggaggcgaattctcagagtgagggttccctgtcacttgagagaaggttccctgtgacgtgaccttgggggacgtcattgccctttctgtccccacccaccccctccgcagttctgttggccaggactttggcctagacaaaggatgggggttgtggctgtggagcggaagtgggtctcaaccactataaatcctctctgtgcccgtccggagctggtgaggacagcctgccagagtctggtaagaaagggactcagggtgcggggacaggggggcgtcagcagggagagggcaaagatcgataaagcaggaattttaagaggcacaatattagaagcccgtgttggaaccatgactgtgtgtgtgtgtgtgtgtgtgtgtgtgtgtgtgtgtgtgtgtgagagagagagagagggagatggagtctcgctatgtagcccaggctagactcaaactcctgggctcaagcaatcctcctgcctcagcctccccagtagctgggactacaggtgcaccaccacactccacaaatcacagaatttagaactgtagactatttgagcttctgcttagagttagggtggctgaggtggggaggatcccttgagcccaggagtttgaggatgcagtgagctgtgatcttgccaccgtgttccagcctgggtgacagagaaaccccatttctaaaaaagagaaagaaaaagggataggtacaatggctcatgcctgtaatcccagcactctgggaggccgaggcgggtggatcacttgaggtcaggagttcgacaccagccttaccagcatggtgaaaccgcatctatactaaaaatacaaaaattggccgggtgtggtagcatatgcctgtaatcccagctattccagaggctgagacaggagaattgcttgaacccaggaagcggaggttgcagtgagcccagatcgtgccactgtactctagcctgggtgacagagcaagactcagtcttggcggaaaaaaagaatgaaaaaatttaaaaaactaaaaaagaactgtaggctgggcgtggtggcttacacttgtaatccaaacgctttgggaggccaaggcaaacggatcacttgatgtcaggagttggagaccagcctggccaacatggtgaaaccccgtctctactaaaaatacaaaaattagacaggcatggtggtgcatgcttgtatttccagttactcaggaggctgaggcaggagaatcgctcgaacccggaagacagaggttgcggtgagccaaaattgcgccatcgcactccagcctgggcgagagaacaagaccttgtcttggaaaaaaaaaaagaattgtagaccatttgcttgtgttctttctccggggatcagatctcaccctctttctgccgtacttcctcatctcctacgtgtggatgatgatattgtgccctgtgcatgttcttcgtcaccaaaagtgcctctctcatagagcaggtgagaactcagtgaggagatgcagggacatgaggtctgacttagggcagagccctaaggtaacacatttgatctactgtaggtccttaatggtgtctgcagagcacctccctgcactgactcagccttagcaaagggcagaggctttgctgtgttccctgctgggcccagaactgtttaggtgctcaagaaagccttctaggctgggctcagtggctcacacctgtactcccagcaccctggggaggccgagatgggaggatcgcttgagcccaggagttccagaccagcctgggcaacaaaacaagtctcccatctctacaaaagaataaaaattagcagctgggcatggtggctcatgcctgtaattccagcactttgggaggccaaggcaggcaaatcacttgaggttaggagttcaagaccagcctggccaacatggtgaaaccccatctctactaaaaatacaaaaatcaggtggggcacagtggctcaagcctgtaatcctagcactttgggaggccaaggtgggcggatcacgaggtcagaagttcgagaccagcctggccagcatggtgaaaccccatctctactaaaaatacaaaatattagccgggcatggtggcaggtgcttgtgattccagctccttgggaggctgaggcagaagaattgctagaaccctggaggcagaggttgcagtgagccgagaacacgccactgcactccagcctgggtgacagagcgagactccatctcaaaaaatacgaaaacaaaaatcagccgggtggtggcgggtgcctgtaatcccagctactggggaggctgaggcaggagaattgcttgaacctgggaggtgggggttgcagtgagccaagattgcaccactgcactccagcctgggcaacagagtgagattccatctcaaaaaagaaaaaaataataattaaaatgttaaaatcaggagtagaatcacagaatgttggaaagtgaggcccaagaagggggctgtgtccaagtccatgcatgggaaacttgactgggacaccgagctcacacagagcaggatctcagtcccccccaccagagtggggcgtgaccacaggaacagccgcctccagtcagcctgccacatgacaccccctcaatgttccagg

SEQ ID NO: 3 - DNA, 12423 bp, Homo Sapiens
tctatctgagtccttcttgctgcagagaaagccttcctgtgacctcatcctttcccctaaatgttgggaaatgctcctgagtcctgtccttgacacatacatcttccttgggttgagggatggggactgggacacatgctttgggaagggcaggtgcagagtgatggggctgacggggtgggggaagcagggggaggagctgtccctctgaggcctttgggaatcggctgtgccaggcatcctcagccctccagctaagcaacacagagagccaaaagaggctactagagacaagaaggccttcatggggccactgcttgtgggggatgtcagcagtggggaggagtgaagcaggaaggaaccgggagactggatggaattgctcccttcacacggtcacacatagccacacatggtcactgggaccagagtcagctctgtctgggcagccaggccctcagtgcaagccaccagcccatctggaggggattagtgctccggccaacaaggtcagctggccccttcctagctggagcctactcaaccttgccaggaagtcagagagctggacaagtggagcccagcctggggaggtggaagagagggaggatggagcatggtgaagcacaggtggcctttttggcagccccagccctggctttggaacagtctgggcagtgtgccaacccctcttgccactgtcgtcccattgaccctcatgaatgagttgcgaggcagttaccttcagcctcctatggataaatattcgaggcccagagagggtaagagacctgcctgcgacccctcagcacttctgtttctctctggggtcttgagggtacaataaagacccctaaggcttcctcttctcgcaggaggtccaggcgcagctgtgggggagggtgcccttggtgtcttctgtccctgcagccagtctgctttctactcggcagctcctctctccctcctgggatgagatgtgcacgcgatgatgggattctgtaaatgggttgggaagaaggagttacctccttaaagggttagttctcccaggagtgctcgaatttctaaagggggcagggtcccacataaatctcactcagaagcaggattataagagttcctgcagcatcccttcccctttgctggtccctcttgagtgtgcaccctgttctaccagcggaacacctgcgggccagggtcactggagacagggccataccgtctgggcggtcacttaagtaacttcatcattctgagcaccccccttccttatctgaaaggtggggggccatccacccagctctcagggctgttaaggtgactaaatgggataatggttgtatcatccctgagcaaagggtatcacagatgggaagattatcttagctccgcagggagccagatgggctgtgagggaggggtaaaggcagggctggagggggctggaggggctggctgagcagggtatatatggggggggttcttcctcaaacccagaaaaactcttagttaggcttagtgtctttgttgagaaactgaggcccaaagaaaggaatttcttgtccctttgtttccctttccctgcctgaggtcattcattcacctaacaactttgtgcccgacactagacaaggccctagtgagcaaaatgaacatagcccctctgggaacacagagcctagatagggagatgatcatttcattactgcaaacacaaacatataatcccagcctgggctaagtgctgtgaagttccagacttgtgtctggctcggtgctgtatcctaagcaccttggcacttaagtggcattgaaatacttgctggaaagaaggccactctgaggaggtgatgtcagagctgaggcttggagggctggagttaaataaagatggtttcaggtcttctttgccttccctgtaggttctgcctctgcctcctctctggcactcaggctaagggtaagcatctccgactggccatcagccccaacatgccgagtacagggatcagatcctgtcttgcgtggccggtctcccctaggtcctgaacccagggaagtgcatgtggatctcaatttatctagatggtgcgtttgtgcctgccctcctttcgggcatgttctagaacagagttcagtccagagcccaggggtggccgggatgatggatgagggtgtggggcctgctgaccaccaggggacctgatcattgggctgggccagcctctctgtcctcattttcccctctgcaaagaaggggtgttgggcgtccctacttctcgcgccagccccggggcctctatcctggcgggaagggcaggccgacccggcagactgcggcctctcgggagggaagaaggtgtcagacgcgcggagcaaccataaatagcccccctttcccagaagacggcacggggttcaagactcaggcgccgcatactcagaatgagagcagagactcccgccaggaaaaaaaggcacttaggggatctgctcattagcatgaaatgcaaatgagcccgcccggcctcatttacacaactctgtgcatggattcggcgaaagggcaaccagggagacgacggcgcagcagccactctgccacttcccccatcccctccccccatcggccggggcgggaactgagacgaccccaaccctctgcggtggcgggaggtgcgcgggggctgcgtgggtggtgcagccttaggagagtgaacaacgcccaggggtgatggcctcagcaaagtgaggggtggtgatggaggtcatccgacccatcccgccgcctctccgcagtggcgcaagcgccccaaaatctccggagagggaactgactgacccactaggttccgccgtgtctacctctcgcagatgttggggaagtgcttcccggcgtctaatcctcgctgttcccccctccaccggcgcccagcacacccgcggcgctccgctcccgggtacccacagctttctggagtggcgccggcggcaggagagagctagagccgactgagccccagaactcggggaggtaggcggggcaagggccggggtctgcgcgtgcgtgtgcacgcgtggaaagcacaaacccacgagggcccgctgccggtagggttaaggtgagtgagtgaaggcggcagacccgcgaagttccagttccgcggacactccttccctaagccacatagggacttaagagaaactgaggcacgaagttggggggtggcggtggtggggactttgaaggtcgagtcgataaagcccagctctgtgcttccgccccctcccacacactcgagacccccacaggttccttcttaggggtcctcgctctgctccgcagcccctcctggggatccgggctctgcggtccagcgcgacctgcctggggccacgtgttcaagcacgaagcccctgcgtggagtccacgcccttcaaaaggtccctaggggcaaagggatgaagcccaggagcgtcaatgtgaggtcaggtccagcgggttagggttacgaggtcagggtcgaagtctcagaattgactcgggagtatgaccaataagcccaagagatttgtggaggccacgcccagaccatgcctaccctagcctttctcgagctccgcccgtttctccaagactgggcccctccagcctgaagccccacccccaggacatccagctccgctccttcccttccccagtcccgcagccaagctcaactccagggtgggagattaaccaggtggagacctgggatttcgctctgggaccccctggtgacaaccctcacccccgtgccgcctgtctcctttcttccccaggcccgcccagagctgagctccgtcctccggctgctgcccaaatcaggggtcgtggacaaaggatgcctggggcctgcggccctacgccaggaccccgcgccgaatactctgattcttcgggctccctccaagggagtcccaaagaccccaatggccaataggaaagtgggttcggtctgggcagcagtctgattggctccagccttcgggagcggacccaggggcaaggggaggggagaggggcggtcctgggttttggggtgggaatcggattccagctgtggttctctccctgcgctcccgcccgcactgccacggcggacggccaatgggcgcgcggctcggggccggcggcgtccggcgattggctgcggggctgtctgggggcggggccgaggcttgaagttgaagtgagggatccagctgtggtgtgcgcggggctcctcgccgccgctttcgctcgctcgctccgcgtctcggccggaggaggaggctgtggcgccggcgacagctacggcagcggcagccaccgcggcggctgcggcggcggcatctccgcctccactcccgcccgggactgccccccactgtctccccgcccctcccggacagtgagcccgcggcggggcgggggaaggagccgcccccaccccctccaagcccacccctaaagagatccctcctcccctcccccgccgcctggcgcggagccgggacgatgctgaccccttagatccggctccagctgcgccgcgggaagagggggcgcccctccccggacccccgccctccgccgctgccccccttttcgttcgccctctcggggcggcttcgccgaaggtagcgccgaatccggcaaccggagcctgggcgcgaagcgaagaagccggaacaaagtgagggggagccggccggctggcccgggaagccccaggggcgcaggggaagcgggactcgcgccgggcggggtttccctgcgccccggcgccccgcgggcagcatgcccctgcgggcagggggagctgggctgaactggccctcccgggggctcagcttgcgccctagagcccaccagatgtgcccccgccggggcccccgggttgcgtgaggacacctcctctgaggggcgccgcttgcccctctccggatcgcccggggccccggctggccagaggatggacgaggaggaggatggagcgggcgccgaggagtcgggacagccccggagcttcatgcggctcaacgacctgtcgggggccgggggcggccggggccggggtcagcagaaaaggacccgggcagcgcggactccgaggcggaggggctgccgtacccggcgctggccccggtggttttcttctacttgagccaggacagccgcccgcggagctggtgtctccgcacggtctgtaacccatatccttcggggcacgacggccaggcgcggggtcagaagggggacgggccgcaccgccgggggtcgggggggaagaagacccaccgccaggtgagtcgaagtgagcccggagggtaggcggatggggggggggctgccagggaggggagggggcaccagagtgggagcggagacgcgagcaggtctcgtcggtaacccgggcttaccccacctgcgtacacacacctcagtcttcctgggttgggggggtggggatccaggccaggagaagagagctgtgccccgctggctcgcagctggacgccctccagatgtggtcaggggagggtcgtcatcctccagatgtgggaagcttcgggagcctgggagctgtactctgcccgcgccggttagcgagctgggtttggtttccgagtttggtggggggtgggtgggggcggtggggaggaagctgcggggacggaggaggggggaccgcaatctcctgggtttccctccttcccccgccccaaagtttgcggcggattctagggtctgatcccccaacctggtccttgaggctgaggtttttactgacctagaaggagatgttggggggcggggaccaggtcctggcccacctcaccccccacctcgcgggttggaggcacaacaaggagattccggcggcggctgatgtcaggggcgcagaatgagaacaagatgtggtggaggggagctgtctgcccccggagctgggagtggagcccctttccgctagagcccagtgccgcgggtgcctcctacccgatctccattcgatgcagggtgcttaagattgggttggggagttttatgctggatttttcttgtggagggaaagactgtgtcaagagcttttttagcaagtgggggatggggttaagctggtccaggttactcctcccctttcacaaataaagagtgctcctgcagaccaggtatgggggactgcaggcccgcgaaagtcttgaggggacagtaatactgtcagtgtgttcactaaggaggactcgggtccaccaccccagcgtagactccgcagataggtttggggaatgcaagccccacattccagggagatggatttagcactgctccctgtctgcccaggctggagtggtaggggagaccccagcccagtcagaccctagctcaaagcgccacttgacagacgcctggccccaagctccctggcgggtcctgccaccgggggaaggaaaggtggaggggaggtgttgctgccatctcaggtctggacagcttctctgggctccttccttccagctcagaggttcttatagacccagggtgggagaccccaggtctcccttgtagcccctgtgagcctagcagggactctgctttggggaaggggggtggaaggttggtgccgccctcactctctgcagctctgctgcctctagtgcgcaaagcagggatgagcttgtggcccccccacccccatcctctacaccttgtgggtctttaggaagctcccctcatcacatcctcttctcatccactgccccttcttcctttctctctgagctgcagaaagagaggtgcaggcctcagaggtctgtgttcttgctgaataggcacaatcttgaggtttgagcccccagccccaggcccctttctcccaggcagggatggagatggagaactgatatggctggaaaggatgggttccgagcaactctcctctctgcccctaatcatttaccccttccacgaatgggaaaaagcatcaacctctatgtcctccttctcaagggtcccaggggaggtagagagagctcttctctcccctctccctgaaaacagacctctaggctagcatctcttctcgcctgccctatctccaggtgctagtggagggtctggaggcagactccttcactgagtggtctggacgggggcaagtgttgaggcctggcatgggggaggagaggtgggaggacagcactcaccttgggagttggggagcagcttcccccaggggagtggtagttgggtgtgtggcatcagcattactaggtctggagaagcctgggttggctgaggatgggttgagaacaattttttggcaggggactgcctaagctgtgcccctcaccactgccatcctacccaagtaccaagagacacctgtatttttgctgccagaggggctctgaactgcctccagggcctccctctttctctttgtggtatctgtgactccccacaggcttcaggagggtccctgtacgcctctgagccggagggacataaggacactcccctccacccccaactaactgaagctagttaggcttttcttggtacattctgcttcttggcctctcctttttaagggaccaggtttcctagagaggagatctagacccaggtaggaagtgtgtgtgtgtgtgtgtgtgtgtgtgtgtgtgtgtgtgtgtgtgtgtgttgcaagggaggacagcaaaaggctcagaagtgcaagctttggtgtggagagcaggggtactggcagacagtcacccctgcctcagatcagaggggagcatgctggcctttccagtatgtgttcctgcaagtgtgagggagcgcgctcccctctcggggaggagttcctccgcattccctctctggctgttgtgtcacatctggaagtttgtgtaggagtttctccaagctcagagcccagcacagctttttctcatttggaaatcacaggctggcatttgggatgccgagagagggggagtgggaggggggccagagggggaagaggggagcctgccaggagtcgggggaggagaggggggggaggcctgaacggcaggagccctaatggcttccagaagtgagtgtgagtgagtgactgtgcgtcactctgtgtgtctgagtgtgtccctctagaggggtgggggcacaggagtttctggagccttccttgccacactgtcccaatgccccaagtctgcctatttctcttacctagggagaattctccatttctgtcctcagaggaaatggtggggggagtgttcttcctgtctcttcatcaattccctcctccaatttaatttccaaaccctaagctcaccagaggagattctggggagaagggctggggctggagaattgaatgggattgagggggggccagatcaccccttggcatgctttctgccccaggcccactttccttctgggtcacacacacattccttcccacccgctctgctccaccgctctgctgggggactccccatcacccgtagtgccagttggagccattcctgggattacccccaccacacagccccccccaccctcgcctgctcccgcccagcactcaccccgccctgcctgcctcagccaggatggcgacagacacaactgctcacacgcagacatgcgcacgcgcgcgcacacacacacgcacacacacacacagagtcacagacgtttgaatcagatttctggcctatttccccttccaaagattccagcgggccgtctctcttgtgtctctgtgtctcatgtctctgtctctgggtggagccggctgcctttctgtgagcttcagttttcaattcagctggaagcctctctccccctacacccatgcactgaagcgtggtgaggggggaaccacagggaaataggcttgtggggtgaggggggggggttctgctgggggaatccccctttgagctttggagcagggcggagcccctacatcccatgttaccctaggggttgccgaatccgatagacaccaggagcctctctgtgggatgggtgaggcaaggacctatccccctacctcctcatttactagaaggccaggactcctgggtccaggcccattttctcctcaacgttccttagtctcacatttccaggctcctaggtgggaatggggccgctggagggcctgcttgccttctcagcccatgcccagagcccctgtgcccctagaggtgtcccagccacccccctcctctccctactttcctcacccttgcggctgccaggctaagcaagggctctatctagataaagccccacacagaggactcatttgtggagataacatgctctagttctctctcccaggagggaggaaaggaggagggatggaagtggggttcctctctctgccgtttcctttttctctgcttttgatggtgggttgtggggagaagaaagatcctcccctctcctaccccctctttgggatccactccagcccggacagtcaccatagcaacagtagacatgtgactgcacaggtctctcatagtcactatggcaaccagtgtcccccgttcccttggttaccatggggatctgtcacatggttttcccccaacctgataacctgtgggtctccctgattctcctcccctgcataaggacaagacaacagcctcagtcaggggagatcatgtgagaggggtctttttaattaccatgacaacaaatccacaccacctggtgacacatcctcctgtcgttatggcaacagaagaacatcacacagtgacatactgccatgttcccaaggaaacaagccctactctgagaagggtgaaagacccccccccccattaattattcctctattcagagtgtcccaaattgtcgtgtgccttggtctcttccctgtccgtttatgcttacgtgtcgtggaaggagagctgtacagggtgggcaggatgttacttggaagcaggctgaattgccaagggacccttaagaaggggctgacatgatcaagagctgtgcatgaggttattcgggggcaggctttgcctgtaagaggcctccagtctgagcctgggtaaggtggggacagaaagaggggcaactcctctgtgaggtcacttctgtaccttcccccagttataagcagttcacctctgtcaagggaaacaaggcaggaagacctgaatggggacacacatctggcttctaggcagggagacttattgattggttgattcgttcattcattcattcagtcttcccaggtattgatcatctgctccgtgccaggcactacagcaagctccgtaggggatctaaagacgtatcagaatgcccctgcctgtcaggagccccagctcagcaggggaggtcgacaagtgcacagattactaacacggtggaactctgccattagaggggtccaagcagatgtcctgggagcccctcttcctcagagatctactgcctccacacagagacattcactcactggggctccttccagacccccctttccctgcagaggagaggaggggacctgcatggggaaagcagaccagttcttgagggtaactgtgtctttccctttccaaatgatggctcccttcctgtccccctttttccagggtgacccctggctgaaccccattctggggagagatccactgcactccggctctactcagaaaaacaattccatggaaacagagcactttttatttcctccctgtcatctgcctacccccaaaaacctagaacttttttcttaaaccctcttattcttgtgagggggtgggggttagggaaactgcagtgcattaggactctcggggtaccacggacaggtggcgagcaggcatgtgagtctaggggagaagggcctgggtggtggagaagagacaggggagggctgtcaggggtttgagggattcatgggctatgggggagggcatgtggcttgggagtcagaacagagatgggctatggctgggaccagctgggaggaaggtccataggttcctgaacattcctgctggcctcttcatgcctggccaaagccttctcattccagaagcaagattccacctgctctgggccctacagagtctggcttggtgggtcatgccaggagctgccacaatacctcccccatccccattccccagggggtctctggtctcctttccccaatctcctgctctctgatcttttctagcctctttactcttccccacccttctcatattttccttaaagaaaataggatacttggtcatttaaccgtgagtccagtgcctggaaccttctaaggtccggaggccgttttgtacattctcctgctgatgggctggaaatgagtcactccatagaatccactgtatggaaagacccagggtttagaaagaacccctctctcctgcttgctgttttggctggtctgggctggaagccacaagcaggtgtgatggcggcaatggcctcttgggggagggggtagacattgtccactctgcacggcttgggagctatgcccagcatggtgcctgacacataatgggtcctcaatatttaaatgtgtgaatatgcctagtggtcatttgagggtgttgagaggttgggaggctggtggtggaagagggagccccgggctctggtgctgtagcaggggggactgcagctgtggacgtctgccttacacctagtgccagggcggtcatgacaggcagttctgcctgcctgagcagctatggtgtgcagaggaaactatcatatatcaggagcttggaaaccaccgtctcatcctgccttctcgggtgaccttcagcacatgacttcggcatttctgggcctcaacttcctcgagttctggggaagaaaatgatctaccccagatatttcacagggctgttgtgagcatcaactgtggcattgtgtgaaagtgcttggtaaactgtaaggcaggcataatccgactttaggtttgtataacacattcacatacagtatctcatttgcttctcacatctaccctgtgaggtagggagaataggattcagattctgcagcaaactcatggtgtctggcatttccacaggcatgatcgatttattccccaaatggcttgtgcaaatagtcagggtatttgtggcttgtcttcctttacagatgaggaagctgggtccagagaggtgagatgaccaaggtgggactccccttctctgatgaggagtctggggctgggggctggtctgcgtgtatgtcagggccctggcaccacacctgcttagcctcagatggagccaggaggtaaacgaggaggaggtgttagggcggggtcggggggccggcctcagctccagccttggccagctgtttccttgactgccagtacc

SEQ ID NO: 4 - DNA, 3720 bp, Homo Sapiens
tgcagttgtctatcaaaattttacatatactttggcacacaattacactcgttggaatttatctcacagacacattcacatttatatagtcaaggatgttgactccaacaacattggtataagtaaaaagttggaaactgcctacatgctcatggataggggataaatcgactaactcaaggtcctcccttacaatggagtactatacagccttgaaaaagaatgacaagatctttatgtcaggacatggcacaatctctaagttatttcaagtgaaaaaataataataataataatattgcagaacaatgtgtatggttggatatacataaattcttctgaaagaatacccaagaaacttaaatgtggctacctcaggagctaggaatgaggtaggtggagaggagggacttttacttttcaatttagaatataccctgttgtgctagttgactttcctcctactgttaacaagtattacagtcctttttaatttaaattatttttcctagcacaaatttaaaaaaaaaaaacttaaaatggaaaaacacacaggcgtgagcaaaagaaatgaatggcaataatctctgtggtttactgagtgcgcctggacatttatgtgctctcagtttctctccacaggaaatgcacaggtgagaaactgacgttaagggggactgagtgtcaagctagttagtggcagagggcagattcaaacccaacacggtcctcccctgctgcccctcggcctctgcctccaggtgggaagcgcatctaccggacggtcggcccggtgaggcgcagcgccccagactggcgcatccgcggccccagcgctccacgcctggggagcgcgcgcgcacgcagcggcgcgagcctggcggcggcggcgacaacaacaacgtcacagctcgagctttccttttcggagtccccggcacacatcctgtgtccatgtttgggcatttacgtcacggcggcagggccggggcctcccaaaatggcagtggcccggggagtcggaagcccggagccagcgccgccgcagctatataagtgggggggctgtgggctgggggagcccggcagcgctttggagaggcgaggagccgccgcccgaggccggtgcgggcgagcgagggcgccgcggctccccgactcctttcccagaggtgagtgcccgaagccaggagcccggcgcccataggtctgtgcgctgcggggaacccctaccgccagcctccccgccacccgcgcgcccccaagcccagcgggcgaggccccgggcgccccacagccggcgccgcgccatgctccaccttagcgagttttccgaacccgacgcgctcctcgtcaagtccactgaaggctgttgcgccgaacccagcgctgaattgccccggctgcctgccagggacgctcccgcggccaccggctaccctggaggtaaggagggcgagcaggggtgctcagacgacgacggcgcagcgcgggggcgcaccatacctgagaaccaggagggactgggacattggagctatgagaataggggcgatgggaagcttaggagtcctggggtgcgcacccccattcccacccacactgggccgccagcgcctccgcaggaacctgtgcggttatcggagcgcccttttgcctgtgcacgtgtgttttgcgtgtgcatgtttctatgtgctccttgggacgtatgcgggcccctgctgaatcagaatgtgcaaaaggcactttgtgtatatccgtgggcaccaagagttttgtaggtaggggctgtggactcaggtgcaccctttgatgtgcccagagctgattcctgctccctcctcagcaggcgacttcttgagctgggctttgaacagctgcggcgcaagtggggacttagccgactcctgcttcctggaggggcctgcgcccacaccccctcccggcctcagctacagcggtagcttcttcattcaggcagtgcccgaacacccgcacgacccggaggcactcttcaacctcatgtcgggcgtcttaggcctggcacccttccccggtccagaggcagcagcgtccagatccccgctggatgccccttttcctgcggggtccgatgccttgctgccgggtccgccggacctttactccccggatctgggcgctgcccctttcccagaggcgttctgggaggcctcgccttgcgcgggtgccccctcgcagtgcctgtatgagcctcagctctccccgcccgacgtcaagcccggcctccggcggcctcccgcctcgccagcgctggacgctgtctctgccttcaagggtccctacgcgccctgggagctgctttctgtgggggccccagggaactgtgggtcacagggagactaccaggccgccccggaggctcgttttcccgtaatagggaccaagattgaggacttgctgtccatcagctgccctgcggaactgccggccgtcccagccaacagactctatcccagcggggcctatgacgctttcccgctggccccgggtgacttaggggagggggctgagggcctccctgggctcctgacccctcctagtggggagggagggagtagcggcgacggcggagagtttctggccagtacgcagcctcagctttccccgctgggccttcgcagcgccgccgcggcggacttccctaaacctctggtggcggacatccctggaagcagtggcgtggctgcaccacccgtgccgccgccgccgcccacccctttcccccaggccaaggcgcgacgcaaggggcgccgcggcggcaaatgcagcacgcgctgcttctgcccgcggccgcacgccaaggccttcgcttgcccggtggagagttgtgtgcggagctttgcgcgctccgacgagctcaatcgccacctgcgcatccacacgggccacaaacccttccagtgccgcatctgcctccgcaacttcagccgcagcgaccacctcaccagccacgtgcgcacccacaccggcgagaagccttttgcttgcgacgtgtgcggccgccgcttcgcgcgcagcgatgagaagaaacggcacagcaaggtgcacctcaagcagaaggcgcgcgccgaggagcggctcaagggcctcggcttttactcgctgggcctctccttcgcttctctctgagcaagagatgggtttatgggttggggcgccgccgttcggcgcgcacgagttccgggccgttcccctccccgctcttcttccaactcctcctcgcacgcccgagggccggcctccgtcccgcttccagtttccttgaagcgcccgccgcacacgccctattcagcaccagctcgccggacagttcccgcggtccaggcgctgtcacccttgtcagccgcgctttgggggaagtcttctgagaccacccagtgaataggcactaccctgggattcaagacagtcttttgtaactgcacacgccccacgccttcctctataacccccagagacaggctggggcaggccaaggcggtctcgcgcgggactttgtacagcagtgtcttatccagcagccgattggatgtaacgttttgctttgggttttttttccttttgttgttgttaatttttgtaaagcagacgctactctcaagcagttgacaaaactgtttatttttgcaattaaaattattgtgctaaaagcttactgaatctgccatgtaagctcct

SEQ ID NO: 5 - DNA, 8759 bp, Homo Sapiens
tagcctggaagagggcagccaggggagaagttagggctggagctatgagaaaggataagatgagatgatggcttcaacattgaggacagaaagaatattgagatgagaaagtagtccattataagcatctatgcaaaggaaatagcagatgtccacaaatcagcagaggcaacaactctgaaagtttattcataagcccctcttttcatctccaatccagttcaaatgtaattatttaaattgttcttcactctccttcctggatcatgaatgagctccttaaatgcagggtccacagtgtcctattcatcagtgaattccaagtgcctagcacagagcctggcaaatagtaaatgcttaacaaatattcgttcagtgcatgaattggagtgattctctactttgctcataagttgaaaaaaggtttattacatacctaaatatgctgaaatcacagggcatttggcaaccccccaaaaccaaaactcccagtttggaaacagaattttaattctgtgaaaataaaatccattcatttattcaaaaaatatttattaaacaatgaccatgtcccacaccaggctgagtcctaaggattcaatgatgaacaaaaaccaacatgattcctgctcttaggaaacatacagttcagtgaggaaaacagattgtgagaagtcctccaacaaatactgggtgctattaaaatatattaaaaggtgagtgggtgagggacttgagctagcctaggtggttcaggaagtcttcctggatgtgctgatatgcataggcattaactagataaatagagagaaggatgaaccaacattgcaggtagagggaacagaatatgcaaaggcaggaaggattatggagtcgttggaggacctgaataaaggccagtgtaagtggatctcagaaaacaggaggaaaggtgtatgagatgagatcagagaggcagatcatgtggggtatggttaatgttttggacttttctattaagagcaatggggagacagtgacaggacttaaacggggaaataatatgaccagattaaactttctaaaaaaccctctatgcaaatatatattgagagttaattattgacaaagattcaaaggcaacaaagtggagagagaatagtattttcaaaaaatggtgccaaaacaataggacatctatattaaaagttgggtatctgtctacaaaacttaattcaaaatggatcacagacctaaatgtaaaactgaaagctatacaacttctggaagaaaacacagatgggaatctgtgtgatcttgagtttgaaaatgatttattatatctgacaccataatccgtaagttaacataattcataagtgaacaaagtgatgaactggacttcatcagaatttaaaatgtttgtgcttcaaaagacactggtatgataatgaagacaaactacagataagatattgttgaatcatatttctgataaaggaattgtgctcagaatacataactctaaaacccccataataaattacaagtagcccaattaaaaaaaaaaaaagagaaaaaatttacagtcttcatcaaagaaagtatacaattgtaaaataagcacatgaaaaatgctctgcatctttattcatgggagaaataaaaattaaatgggaaagacacctctaattagaatactaaaattaaaaagactgaccataccaagtattggtgaagtggaaatgtaaaatgatacaatcacttaggaagatgatttggaagtttcttacaaaagtaggtgtatacctaccctgtgactcacccattccatggctaagtatttacctgagagaaatgaaagaatacatccatacaaagatgtttatacaaatatttatagcagttttatttgtagtagccccaaactgaaaagaacccaaatgtccatcaaaagtgaatggataaacaaagcgtggtacagcaatgcaatagaatactacttagcaataaagaagaatgagctagtgatatacataacagcttaaatgtacatcaaaggcattgtgctcagtgaaagatgcaagtaaaaaaaaaaaagagtacatgctgtatagttccattgacataaaactctggaaagtgaaaaacagtctatactgacagaaagcagatcattggttgcctgaggaggaggagtataggagaggtggagggaaaatgtacaaagtggcacaataaaaacttttggaatcatagatatattcactatcttgattgagtgatgatttcatgagtgcacgcgtgtgtcaaaaatgatcaatttatgcaactttaaatatgtgcagtttattgtatatatcaattatacctcagtacggctattaaaaagaaaccctctggctgcacaatgcagaactgattctaggaaagagtggagggaggatgaccatttacagtgctccaggtggaagagaacggtgccttctggaagtgaactaggttggcaacaacagagatgaaataaatgggcagatgtgtgagatacttaggaaataaaacccgatggtcaccattttccaaaggtcagctcatcctggctttccagagcaaagagctagggaagactttattaataaatccctcttgaagttgcagaggaagcttatagcagaaacttactctcaacctgactaatctgagagaacacctctggttccatttgattactaaaaaactgcaaagaacaggaggagaaagaagaagaaagctggtacaaacagtgaacttatataatattaatcaataattgtctcttgttcttaaaagcaatgggaagaaaatgagatttgagctggaagatcagagttcaaaatccaaataaagtatatggccctaatatgcttatagtagttaacctttcctgataatgatataattgttgacagcaccatctttaaaaataaaaataacatagtaatccttcagatttgtagaatgctttcctgtttacaagtttgttctatacacattatgtcttttaaatgacacactagccttctgagggtaacttatattggcaacagttttcagatgtggaaactgtgaagacaatgttggtgatgtggaagcaacataaactttggagtctttcagacccaggtttgaatgtcagactgctttttattcagagtaacttcagagcattatttctcaccttaattttttttcaggcctctttgtgtctatgtgtcctcttcactcctgtccattgttcattcagtgatttttgcaccttccttcactgttagtgtgtagacacatagttctcctggctctgagacctatgttaattccattctaccatcctgccagcccactcaattcctattgagcaatgctagttgaaagttgtggtgggattaaatgttgcaatgagtattcaaatgaggttgaagtatctacgcattctacttacatatggtgaggtatattcaaggaaggctgtagccattaaaatctcaggaaataatttttcacctcctcaggtgaaagggtcttcaggcctttgtgttctggaaggttcatttatagccatttcccaaatgacaatgcgattgatgagtctagagtctagctcaaatagcaatggactggaagactagtttaggttttactaatgtggaacatagaacaaattatgtccttgtttcagcctgttcatctgtgaaatagagcctatcatatccagtcttccttgcctttaggtttgagttaccttctttggtcaaggtaagtaaatgcctatgatgtttggctgtgcacaagataaagctacaacaaagctacaacccatcttttctctgtagaagactgcaaaaagcaaaagagacccaggcaaaaatctcggaatgacttttggaacagagagcctccccagaatcagaagtcaaaggaatttaaaacatagggaggcccagggtctctactgacataaaggaaagatgttttccttataggtttacgtttacattttctctctctttccattcccacttgcatctccacctttacacagggcttatgggacctcctccacaaaagagcagttgcagtaacccacatcatcctctacgcctggctgtccatcaagaggcgaaaagcagccctatataggttctatccttggatagttccagttgtaaagtttaaaatatgcgaaggcaacttggaaaagcaagcggctgcatacaaagcaaacgtttacagagctctggacaaaattgagcgcctatgtgtacatggcaagtgtttttagtgtttgtgtgtttacctgcttgtctgggtgattttgcctttgagagtctggatgagaaatgcatggttaaaggcaattccagacaggaagaaaggcagagaagagggtagaaatgacctctgattcttggggctgagggttcctagagcaaatggcacaatgccacgaggcccgatctatccctatgacggaatctaaggtttcagcaagtatctgctggcttggtcatggcttgctcctcagtttgtaggagactctcccactctcccatctgcgcgctcttatcagtcctgaaaagaacccctggcagccaggagcaggtattcctatcgtccttttcctccctccctcgcctccaccctgttggttttttagattgggctttggaaccaaatttggtgagtgctggcctccaggaaatctggagccctggcgcctaaaccttggtttaggaaagcaggagctattcaggaagcaggggtcctccagggctagagctagcctctcctgccctcgcccacgctgcgccagcacttgtttctccaaagccactaggcaggcgttagcgcgcggtgaggggaggggagaaaaggaaaggggaggggagggaaaaggaggtgggaaggcaaggaggccggcccggtgggggcgggacccgactcgcaaactgttgcatttgctctccacctcccagcgccccctccgagatcccggggagccagcttgctgggagagcgggacggtccggagcaagcccagaggcagaggaggcgacagagggaaaaagggccgagctagccgctccagtgctgtacaggagccgaagggacgcaccacgccagccccagcccggctccagcgacagccaacgcctcttgcagcgcggcggcttcgaagccgccgcccggagctgccctttcctcttcggtgaagtttttaaaagctgctaaagactcggaggaagcaaggaaagtgcctggtaggactgacggctgcctttgtcctcctcctctccaccccgcctccccccaccctgccttccccccctcccccgtcttctctcccgcagctgcctcagtcggctactctcagccaacccccctcaccacccttctccccacccgcccccccgcccccgtcggcccagcgctgccagcccgagtttgcagagaggtaactccctttggctgcgagcgggcgagctagctgcacattgcaaagaaggctcttaggagccaggcgactggggagcggcttcagcactgcagccacgacccgcctggttaggctgcacgcggagagaaccctctgttttcccccactctctctccacctcctcctgccttccccaccccgagtgcggagccagagatcaaaagatgaaaaggcagtcaggtcttcagtagccaaaaaacaaaacaaacaaaaacaaaaaagccgaaataaaagaaaaagataataactcagttcttatttgcacctacttcagtggacactgaatttggaaggtggaggattttgtttttttcttttaagatctgggcatcttttgaatctacccttcaagtattaagagacagactgtgagcctagcagggcagatcttgtccaccgtgtgtcttcttctgcacgagactttgaggctgtcagagcgctttttgcgtggttgctcccgcaagtttccttctctggagcttcccgcaggtgggcagctagctgcagcgactaccgcatcatcacagcctgttgaactcttctgagcaagagaaggggaggcggggtaagggaagtaggtggaagattcagccaagctcaaggatggaagtgcagttagggctgggaagggtctaccctcggccgccgtccaagacctaccgaggagctttccagaatctgttccagagcgtgcgcgaagtgatccagaacccgggccccaggcacccagaggccgcgagcgcagcacctcccggcgccagtttgctgctgctgcagcagcagcagcagcagcagcagcagcagcagcagcagcagcagcagcagcagcagcagcagcagcaagagactagccccaggcagcagcagcagcagcagggtgaggatggttctccccaagcccatcgtagaggccccacaggctacctggtcctggatgaggaacagcaaccttcacagccgcagtcggccctggagtgccaccccgagagaggttgcgtcccagagcctggagccgccgtggccgccagcaaggggctgccgcagcagctgccagcacctccggacgaggatgactcagctgccccatccacgttgtccctgctgggccccactttccccggcttaagcagctgctccgctgaccttaaagacatcctgagcgaggccagcaccatgcaactccttcagcaacagcagcaggaagcagtatccgaaggcagcagcagcgggagagcgagggaggcctcgggggctcccacttcctccaaggacaattacttagggggcacttcgaccatttctgacaacgccaaggagttgtgtaaggcagtgtcggtgtccatgggcctgggtgtggaggcgttggagcatctgagtccaggggaacagcttcggggggattgcatgtacgccccacttttgggagttccacccgctgtgcgtcccactccttgtgccccattggccgaatgcaaaggttctctgctagacgacagcgcaggcaagagcactgaagatactgctgagtattcccctttcaagggaggttacaccaaagggctagaaggcgagagcctaggctgctctggcagcgctgcagcagggagctccgggacacttgaactgccgtctaccctgtctctctacaagtccggagcactggacgaggcagctgcgtaccagagtcgcgactactacaactttccactggctctggccggaccgccgccccctccgccgcctccccatccccacgctcgcatcaagctggagaacccgctggactacggcagcgcctgggcggctgcggcggcgcagtgccgctatggggacctggcgagcctgcatggcgcgggtgcagcgggacccggttctgggtcaccctcagccgccgcttcctcatcctggcacactctcttcacagccgaagaaggccagttgtatggaccgtgtggtggtggtgggggtggtggcggcggcggcggcggcggcggcggcggcggcggcggcggcggcggcggcgaggcgggagctgtagccccctacggctacactcggccccctcaggggctggcgggccaggaaagcgacttcaccgcacctgatgtgtggtaccctggcggcatggtgagcagagtgccctatcccagtcccacttgtgtcaaaagcgaaatgggcccctggatggatagctactccggaccttacggggacatgcggtaagtttttccttccagaaatgtcgcctttcggcccagggcagagtcactctgtgttctggggtatctagcggctcctacctgcgcgaacactcagattgcccctgggagagctcagcagggtaaacctagagctctcccgtggactcccggcctgccagaggtttaacctgagctctcctaatttctgctgcgtgccctgggtgctgattcctgccctcccagattcttcaactcccccaaccgccccaaattctcactacctcctggtactcgaggtcccaaacagaaatcctattgcacgggccaccttcagagataaagctcccaagccctccactcttcctttcctcctgtcctcaaagtctgagaacctcaacaggaatttgggcaatttctcctcttcaggtctgttaggatttcactttcagcctgcgcagattagagtcaaaaagaccggcccaatagcttctcagcgggtatcctccagagaggtaaagtgaaattctcggttagggaaagaaagtggtctctgggtgctgaggtctgctgtgtgaaagggtgaacttctttctcctgaagcaactggggacttgctccagggctggaggtcagtagagataatccaaaccgtcatgtttagagtaggcagaggggcaactttcttggtaaagacttcacaggatttgcactcacagtttctcaacgttggttgactatgttgaaagtagttgcttgggtcggttttctcttgtaaagtgtttattttctctgtggattataacagatccacagccccctacttcaggtttgcatcagatctataaagaggagaatattcttttaatgtacaatttaattaggcttgactctgacttacaaaactgttggaaaacatttttttgtaaagcatttcctgctatttcagtgtgctccaaaatctccactggggagggtggagtgaggttttttattatattcctttatttttaggacatgtttgcattttagaatatgtgcagttagct

SEQ ID NO: 6 - DNA, 8404 bp, Homo Sapiens
aggaagctaaaaaccttgaaaaaaggttagaggaattgctacctaaaataagcagtttagagaagaacataaatgacctgatggagctgaaaaacacagcacaagaacttcgtgaagcatacacaagtatcaacagccaaagcagaagaaaggatatcagagattgaagatcacctttatgaaataaagtgtgaagacaagattagaggaaaaagaatgaaaagaaacgaacaaagcctccaagaaataggggactatgtgaaaagaccaaacctatgtttgattgtccctgtacctgaaagtgacagggagaattgaaccaagttggaaaacactcttcaggatattatccaggagaatttccccaacctagcacgacaggccaacattccaattcaggaaatacagagaacaccacaaagatactcctcaagaagagcaaccccaagacacataatcgtcagattcaccaaggttgaaatgaagccaaaaatgttaaaagcagccagagagaaagtcgggttacctacaaagggaagcccatcagactaatagtggatctctctgcaaaaaccctacaggccataaaagatgggggccaatattcaacattcttaaagaaaggaattttcaacccagaattttgtatccagccaaactaagctttataagtgaatgataaataaaatccttcacagataagcaaatgttgagagattttgtcaccaccaggcctgcattacaagagctcctgaaggaagcactaaatatggaaaggaaaaattggtcccagccactgcaaaaacataccaaattgtaaagaccattgacactatgaagaaactaatgggcatcaactaatgggcaaactaactggctagcatcataatgacaggatcagattcacatataacaatattaaccttaaaagtaaacgggctaagtgccacaattaaaagacacagactggcaagttggataaagagtcaagacccatcagtgtgctgtattcagcagactcatctcacatgcaaagacacgtgctctaaataagggaatggaggaagatttaccacagcaatggaaagcaaaaaaaaaaaaaagcaggggatgcaatcctagtctctgataaaacagactttaaaccaacgtagatcagaaaaagacaagaagggcattacatgatggtatagggatcaatgcaacatgaagagctacctatcctaagtatgtatgcacccaatacaggagctaccagattcataaagcgagtccttggagaggaagaaagagacttagactcccacgcaataatagtgggagactttaacaccccgctgtcaatatttgacagatcaatgagacagagtaattaacaaggataatcaggacttcaagtcagttttgcaccattcagactaaatagacatattcaatatatatatatatatatatatatatatatatattttttgagatggggtcttgctcttgtcgcataggctgaagtgcagtggcatgatctcagctcactgcaacctctgcctcctgggttcaagtgattctcctgcctcagcctccagagtagctgggattacaggcacctgccaccacactcagctaatttcgtatttttggtagagatgtggtttcaccatgtttgccagcctggtctcaaactcctgacctcaggtgatccacccgccttggcctcccaaactgctgggattacaggcgtgagccaccgtacctggtctagactctgccgaaattctaatacttctttggtaatgcaacagaaaactaaagattttgatggtgaactcaattgcttctgagttgtgtggatgaaaatatattttattattttttccttcaacttttaagctcccaggtatatgtgtaggatgtgcaggtttgttacacaggtaaatgtgtgctatggtggtgtgctgcacagatcaacccatcaccatggtattaagcccagcatccattagctctcctgatgctctccctctccccacccttccccgctacaggccccagtgtgtgttgttccccttcctgggtctattttatggtatgtatgtgtgtatgtgtgtgtgtgtgtgtgtgtgtgtgtgtgtgtgtgtatctatttatgtgtatatattatgatatatacaccacacttttttcaaactattattttaggtttagggatacatgtgcaagtttgttatataggtaaactgtgtgtctctggggtttggtgtgtacagattttttcaccacccaggtaacaagtgtagtacctgataggtagttttttgatcttctgtcctctcaccctacaccctcaagtaatcccccagtgtgtgttgttcccctcttcatgtccatgtgttctcattgtttagctcccacttataagtgagaacatgcagtgtttggttttctgttcctgcgttagtttgctgaggataaaggcttctggctccatccatgttcctgcaaaggacatgatctcattcctttttatggctgcaggaaaatatattttacatactagtgaacatagttaaattaatccatggtcaagacatatattcttttgtaaattgagaaatctctttatcataattgtaatatggtaataaataaatctagattacataaatgtaatctagatgttgataaactggttttaaataaagcaagtgatatctacgtatgaagagagtttacttcagttcctagaactttccttcactttcctgccatccctacttttagtaagcaagcatttactgtgtgtgtaacactgtgctaggtactaaggcaatgatgatacccaagatttggtctctatcctgaagataagcacaggagaaacattatcagtcatgatgctttctgttgcaaacaagtgaaaacctcagctcagcttaggtcagctccagggctggccaaatcagaggctcatttataacactgaggatccagattcttttgaaattcctcctgcaccaatatcagcatttctaccttctctgtagggtggcttgcctcacgttacaatggctgcagcaatcagaagtgtcacatcctcagtaatacttaatattattactattatttaataatatttagaactgtgccatccctgtttcaatttatcaggctcccagcagactactccttatctttcaaatgtcaaaactgcatcctgagctcttgcctaaactaatctggggtgaggtgaatggaagtagcactttaattgtattcattctttgtagctggacctgggcctgggctatctcctgacatttgcccacaagaaagatttctgaagttaggtaggaatggctgttgagtaggccagtgcttgccaaacctttacacatcctcacatatgtcataatatgcagataaaaagataatcccttatacaacttgctgggataaactcaggaggcttacagcatgacctgcttgaaggttcttcctgccttagaccttgctcagctgctccaggatgaggggatttacatcacagcacaactgtattttattcacagcataaaccatctctttccttctcagttgacgagttcagatgggcaataacagtgtctgccaaagagaaaaaaaaatgtattcaaactagataatctattggtacaaataccgagacacagaagtgataacagctttaagccaatgtttgatggtggtagtcccagcaagctcttttctgatgtctttgtgcctttgcacatgctccttctctgtcactgttttcttcatcaaacataatataatggacaagtggaatcaaatagaattgagttcaaattctctgctacccatcggccctggtattggacaaattaactcctctgagcctgtttcctcatctgcaacgtagactagctaatactacccattggaaagcgttgtttcttagctaatgcatgcaaggcttaaaacctagatgacgggttgataggtgcagcaaacctccatggcatacgtatgcctatgtaacaaacctacacgttctgcacttgtatcccggaacttaaagtaaaaaaaaaaaaaaaaaaaaaaagaaagaaagaaaaagaaaaaaaaggctgtttctggggattaaataagacaattatgtaaggtggccagcacagttcctggtacatagtaaatgtcaggcctgcctgacagacttctattcagcagctactgctcccctgaaaatcttcctcagacgtttccacggtgcttcccgttcttacaccactacaatcctttattacactactatccgttcattccccacagctccctcccttcctttccctaaccagtgatcccaaaaggccagcaagtgtctaacattttctatcttctaagtgactggtaaagttccgcacctatcagcgctccaagtttgtttttgttttggccgactttgcaaaacggattgggcgggatgagaggtggggggcgccgccaaggagggagagtggcgctcccgccgagggtgcactagccagatattccctgcggggcccgagagtcttccctatcagaccccgggatagggatgaggcccacagtcacccaccagactctttgtatagccccgttaagtgcaccccggcctggagggggtggttctgggtagaagcacgtccgggccgcgccggatgcctcctggaaggcgcctggacccacgccaggtttcccagtttaattcctcatgacttagcgtcccagcccgcgcaccgaccagcgccccagttccccacagacgccggcgggcccgggagcctcgcggacgtgacgccgcgggcggaagtgacgttttcccgcggttggacgcggcgctcagttgccgggcgggggagggcgcgtccggtttttctcaggggacgttgaaattatttttgtaacgggagtcgggagaggacggggcgtgccccgacgtgcgcgcgcgtcgtcctccccggcgctcctccacagctcgctggctcccgccgcggaaaggcgtcatgccgcccaaaaccccccgaaaaacggccgccaccgccgccgctgccgccgcggaacccccggcaccgccgccgccgccccctcctgaggaggacccagagcaggacagcggcccggaggacctgcctctcgtcaggtgagcgagcagagccgccgtcgcctcacgcgggaagggcgccccgggtgtgcgtagggcgggcgcaaggcggctcggcggggacccgtcctcgccaggggccgggtcccggcgggaggaggcgccctccctgccccccgccacggcggagcgtctgcagaatggtgacaggattctgggttcttgggcgaggggtctcggcttcaacttgacaggtgtcgggcgggtggggctagggtcctgagcgaagtgacaggtgcagttccctcttgtgaggctcggaggcagagggtcgttgcgagcgtccatcagacgcaaaaaatgaaaaataaaaatacaaaaatggtgtctgtgggagagtttttcaccggagaattggagtactccggtggtcgtctgactttctgttttggttcacgcgatgcaacagttgggaagtattttcttccgggcgtgcactgcatctgaagtccatttgtgggagaggccgaccagaaagccttggacaagaagcgcagggtcctgagtgtccattgcccacaggatactcggctcaggagctttgcggcgtttccttagaacaataatgcatcgaggccttggggactcaaagccatctgtagtgattgatggagcgtaactctttagaggaactgaaacatgggcaaaactttcatgagacatttaccagaagtgcttgaaagtttctaaacttttttttttcctgtttgatgaactcttcttgcgtgttagtcggcttcggcttgtctcattatttcttccattttgccttttgactttgaaccagcaaggatcttggtgtcccctctttttgcctttgtttttggcacaaaattagtggttctgtgcgcaaatggaaattttcgttttcccttattaagtggaatctaaatttaagcaagtccatacgaatgcactagatcttgaagggaagtatttattgtattacaacatcttacttttcttgatttttctactttatggttaaatagctatgattgaaagagtgtaattgtcattattgtcagcactggttctactttgagacaagttcattgcagagggaatgggacttgtttctgtttttcactattttctctcccattcttgtctatcaccaaatcctttcaccctcacccatttctttccactcggtatacactaacaattcacggcagaaaagattgaagtgggatttaggaaatggcccctggaaggctattaaaaatttatatatttaaatggactgtcttataggtcagttaaaaaccatattcgttaaaaaaccaaaataacaacaacaaaaaattaaaaaccacgtctggggcatgttctgggaaaagacatggctttagtttctgattaaattctgatgtatccaattcttgcaaatttcccttgggaaaatgcagtaatggctactctaaagaattccatgttatgcacacagctttggaagcatactctaatgtagggtaaccaggaatattgacgttgtggccactgcttggaaaaaagaggactgtttctttcattttttaactcattttatatattttaagtaatggaactataaaaaattctcttataagtcaaaaccatacaagatacagtctgttcttgattatccatacccacaaagggtttcattaacatagacagttgaactctataaattaaccagcaagggtagaaccactgccgtgcagtctgatactgagcatcttgcctggagatggaatcaaggctcagtccaactgcacctccagtgacagattccattcctgatttgagagtttagatcttatttctgttgccttatctctggcctaagtaatgtagctggaagggaaactgtcactaggaacagcataccacattcattgttgaaataatcaaaggttaatcatgtttcgagctgggtgtgatggcgcgtacctgtagtccatgctactcaggaggctgaggcaggaggatcacatgagcttgggagttggaggccagcctgggcaacaacgcaagaccccagtctttaaaaaaacaaaaaagctgaccaggcatgttggctcacgctgtaatgccagcactttgggaggccaagatgggaagattgcttgaggccaggagtttgagaggagcctgggcaacaaaacaagaccctgtctctaaaacaaattttaaaaaattagccagtggctgtggcacacctgtaggctcatctactcaggaggctgaggtgggaggatccttgagcccaggagtttgagactgcagtgagccatgatttcaccactgcaccccagcctggatgacagagtgaaaccctatttcaaaacaagaaaaaaaaacaaaaactaattatgttttgaaggaggaattggcagtctagaatagtggtcaagggcatggattatagagttagactgttgggctcacatagtggtttacctcttaccggctgagacctcaggtaagttctttaacttctccaatttgacagacatctgtaaatgtctacttttacagatgagaatacttatctaaaagggctgatgtcgggattcagtgaaaccatatgtttaaggtactttctacaggatcatagtaaatactcaaaaattattaattattcttcatactattcttattagtagataacacatagaaattagatgaatgaaaatgaattagccaacaagaatttattaaatgcttgtctttgttaaggggaaaggacaaaaataagcagtcgcatcatgtaagatgtgctagtaggtagagagatatatgaaacattgataagagaagactacagtttaacaaagtcactggcgttgaattgtataatattatctatgggtttttatctttttgttgttatctttatcctattttcccaaacagctttagctattacatttactttccttcacagaagtgttttgctgctttgaagtatatttgacttaccatgcaagcaaatatttttcactgtgtggtatccttattttggaatgaccatgaaaaagataatcatatgtttaaatttgaagtgtaatgtttttctaagataaaataagatcttaaagtatttaataatgttctttttcacagtagtgttatgtgcaaactattgaaacaagtatgtactgaatcaatttgatttataagtatatgccaattatatgattattttcatttggtagg

SEQ ID NO: 7 - DNA, 5312 bp, Homo Sapiens
gtcggcctcgggggtcgacgatcccccgggtaggcgacgtgccctgtccaggcctcacttcccgcgtccgcaaaacggggtggacaacgcagcctaaggcagagccgcgccaaggtccctcgctgtcgccgggctctggcggcctgaccgggcctggggtccgagcgtgcccccgggcctgggggggtcgccgcgatggactcgctggcagcgccccaggaccgcctggtggagcagctgctgtcgccgcggacccaggcccagaggcggctcaaggtgcgtgtgtggagagggcggaacgtgggtctgtgaccccgcgggctccgggactcggcatggggtccccgtccccgcgcgccacggcccgccagcgcctaggctcagcccttccctccgcagcggcctcgcaggtccgcggccccacggtggggcgacgtgccctgtccaggcctcacctcacgcgactccaaaacgcggcggagaatgcggccgtgggacccctccaggggccccaagggtctgcgggggctgggcgcctgggcgcgcgggcgggggaggctcggcgccgcggtctataaataggcgctgctccgccaccgccgctgccgccgcccccgcggctggatccgggccaggtggggcctcccgccccctggcactctccggaggggtgagtgtcgaggcccccagcttctccggcttatggagggccttgagtgtgtcccaggggtcccaatcctgctgccctctgcccgaggagggaggacatcgcctgtgcctgctgcggcctgacatctccccacggaataaatacagtgtcggtccctgcagagccctccctgggattggggccaggggtgccttctcctgccaccacctcgcctgccttcttatctccaggcttttgcccacgggccctccccttatttttgccaacgaaatgccccaccctgggaaccgtaccctctgctgtctcctcataccgcatttggtaagagacagggtattgggcttctggagaaacctttgtgtccctaccctgttccatcctgtccccaggacattgacaagcagtacgtgggcttcgccacactgcccaaccaggtgcaccgcaagtcggtgaagaaaggctttgacttcacactcatggtggctggtgagtgggccaggctcctcgggggagtggctggggtcactggccagccaagctctgtcgttggagccccagacctaacgcagctccttctctgtacctgtgtgcaggtgagtcaggcctggggaagtccacactggtccacagcctcttcctgacagacttgtacaaggaccggaagctgctcagtgctgagggtgagtggcccccaggaggccctggcactgatccccagtccccttccatgggacctctccaaggactccctttcaggtccagctcccactgttctgttctcgcggtgtgggtcccctgggggtagggccaaggcaccaagatggatgaggacgagggtcctggctgccaagggtgaggggctgagggttggagaggcccttccagtggccccttccccgtagagcgcatcagccagacggtagagattctaaaacacacggtggacattgaggagaagggagtcaagctgaagctcaccatcgtggacacgccgggattcggggacgctgtcaacaacaccgagtggtgagtgaggcctgctgagaaaggccttgcctaggcggccacagcactcgaggcctggcctcacctccctcctgcccacagctggaagcccatcaccgactatgtggaccagcagtttgagcagtacttccgtgatgagagcggcctcaaccgaaagaacatccaagacaaccgagtgcactgctgcctatacttcatctcccccttcgggcatgggtgtgtggctgtcctggggccaggctcgggagtgcagcccctacaatatggccccctggctgtgcctatgcccacccttggctgctctcggcaggctgcggccagtggatgtgggtttcatgaaggcattgcatgagaaggtcaacatcgtgcctctcatcgccaaagctgactgtcttgtccccagtgagatccggaagctgaaggagcgggtgagcctgccgtcgcacaggggcctggccagggccctggggctgagagtaccagggggacttgtctggcctcaaatctgatggtccttgccccaccacagatccgggaggagattgacaagtttgggatccatgtataccagttccctgagtgtgactcggacgaggatgaggacttcaagcagcaggaccgggaactgaaggtgaacatgcagactggtggggcaggggggatggagctggtgaggggcagaaccagagggctttgtctccttcacattgagcctgctggaggagggccaggtcagcccagttgggtgcaagagtcatttgttctaggagtagaggacctgtacccccttcatccagggctagaaggtaaaggtcaccatgtctttgcctggctggggtgggtcatgtgggccccgtgtggtgcttggcaggtatggagcacttgcccagatccagaggtgcagcagtgggccaggcccccaaccccaaccctcttcccatgggtcaccagaggaaggggctgccccagtggcacaccctggctcccagatttctgagctccagggttggtggctttgggtgccccggcagctagagtgatgatggagaccatgccaggggcaggtggccaccagggcaggggcatcagcatggggagacataggctcagccctggggagggaaggggcagctggagggggtggttcttgatgagggaggagatgaggagggagcatgcctggttgggcatagcctggaaaggccctggaatgtgagccacatgggctctggctccagccaggggcagagaggccagaaaggggcaacgccaggatctctttgaggagagatagttgatggtgatgctggaggggtgccccgggagttacatgcccgtttcccatcagtaaccgtgcaattacgctcaccgggtgtgagcctttctccctccttcccccaggagagcgcgcccttcgccgttataggcagcaacacggtggtggaggccaaggggcagcgggtccggggccgactgtacccctgggggatcgtggagggtgagtagagtcttggggtaccaggtctggtgggggaaggctgtcctgggccggcgccagcccactacccacccccaccccgcagtggagaaccaggcgcattgcgacttcgtgaagctgcgcaacatgctcatccgcacgcatatgcacgacctcaaggacgtgacgtgcgacgtgcactacgagaactaccgcgcgcactgcatccagcagatgaccaggtgcgcgccccagccgcgagccagacctcgcccctctggccccgcccacgtctccataactgagggccggtcctgtcagcccacccagacttgaactttgcaccattccctaagccccccccctcccccagagcctggtctccctagaaccaagtccagggctgtgagggctccggagggcagggcctcagcagtggcggggatgggccaggcatcgccagcccacgctgagcctcccggtggcgccgccccgcccatcctcccccccgccccgcgcagcaaactgacccaggacagccgcatggagagccccatcccgatcctgccgctgcccaccccggacgccgagactgagaagcttatcaggatgaaggatgaggaagtatgtggggcggcgggggcggcggaggcgggcgtcagggatgctcctccgcggtgctgctcacccgccgggttgtctccgcccgcagctgaggcgcatgcaggagatgctgcagaggatgaagcagcagatgcaggaccagtgacgctcgccgcggacacaccgtccgtctccgggacgccctcgcacccctggacaccagaccggactgttcccgacccggagacgcggggccacagcccccagctgaccctaatttattctcagcaccaccccctcccaggtcattgtgtctgtttccgaggggcctggaccgtagcccccgcccagctggccctctctgaccttgggggatcaggagcgaagttgggcgggacttcagagatccgcctcccttgcccttcccccgcccccggacggtcacagcacccaaaccgcaggccctgctctggcaggcaggcaaagctaggcagaagaggattcccaggatcctgggtctgttccctgccccagtgctgcagaacggacttgggagccctcctttgcctgctcccgcgggtcacccagcgagtgctgagaccccattttctgtcgaggcgggccgagtcttcccttatccccagacgcctagcgggcagggttgggctgaatcaaatgggagccctccagacataaggaggccagaggctgcaaggagcggggtcgtgaccgcttacaccccttctccacagcccggcccgacctggagggcccccggggcactgggcggtgagccacctcctggcaactctcggtgccgtcccctgccctcgctcgaggcctcttctccccagcaccgctgtggtgtgccgggatcctgagcctaggcctcccgatgttcccacccgcatgatcccttcccgccacacgatgctccgttttcttccgttgtgaatgccgcgtcctgtcctggtgacaggagaacaatgttggtgaacgtcgcagcgggtgtccgagtgctccgtgtgcccctgagagcgggtgggagcggaagcctgagcggcctgcggcctccggcgatagtgtgctatctgccgctgcagcgcgcgtccgcgcggcctctgggctatttctggccaggccgcagcactgtggtcggtgcgggcgtggcaggggcggggcggccttatcgctcggctctcccgcctacgcctcccgctgcagagtaagccgggctgccgtcttctcgccatgggctccggtgagtctggagtccggtcgggcccccggctgctccctaggccgacccgggttgagaggagctctggtcgtttggctgcagctgggagagacttgggtcagacttagaggggacttccagccggcgtgcggggtggtcagggtggagaggctggcgggctaccgggacgccgggcatcaggggctggatggagccgggccggcagtctgggtactcagagatgtcgcccaggtgcccgccgaccgctcggcttactgcggcgcttcccttgcagg

SEQ ID NO: 8 - DNA, 3025 bp, Homo Sapiens
ctctcacgacctgatttctacagccgctctacccatgggtcccccacaaatcaggggtacagaggagtattgaaagtcagctcagaggtgagcgcgcgcagccagcgtttcccgcggatacagcagtcgggtgttggagaggtttggaaagggcgtgccggagagccaagtgtcagccgcctagggcttgccggtcgctccctccctccctgcccggtaggggacctagcgcgcacgccagtgtggaggggcgggctggctggccagtctcgggcccctcggccaccccggggaccccccccaagccccgcccccgagtgttcctattggcctcggactccccctcccccagctgcccgcctgggctccggggcgtttaggctactacggataaatagcccagggcgcctggccgagaagctaggggtgaggaagccctggggcgctgccgccgctttccttaaccacaaatcaggccggacaggagagggaggggtgggggacagtgggtggggattcagactgccagcactttgctatctacagccggggctcccgagcggcagaaagttccggccactctctgccgcttgggttgggcgaaagccaggaccgtgccgcgccaccgccaggatatggagctactgtcgccaccgctccgcgacgtagacctgacggcccccgacggctctctctgctcctttgccacaacggacgacttctatgacgacccgtgtttcgactccccggacctgcgcttcttcgaagacctggacccgcgcctgatgcacgtgggcgcgctcctgaaacccgaagagcactcgcacttccccgcggcggtgcacccggccccgggcgcacgtgaggacgagcatgtgcgcgcgcccagcgggcaccaccaggcgggccgctgcctactgtgggcctgcaaggcgtgcaagcgcaagaccaccaacgccgaccgccgcaaggccgccaccatgcgcgagcggcgccgcctgagcaaagtaaatgaggcctttgagacactcaagcgctgcacgtcgagcaatccaaaccagcggttgcccaaggtggagatcctgcgcaacgccatccgctatatcgagggcctgcaggctctgctgcgcgaccaggacgccgcgccccctggcgccgcagccgccttctatgcgccgggcccgctgcccccgggccgcggcggcgagcactacagcggcgactccgacgcgtccagcccgcgctccaactgctccgacggcatggtaaggccgggaccccaggaagtgaggaagttagggcggcgctcgggatatcagggacgcgtttccgagggcggggagctggccttgcgggaggtttgggccaggatccttcccgagagagaggacccccttgtcctgggcagctgtcactggggtagcctgttttggaagtgtgcgggcaagcgttcgagctgccccattgggggcgctattagaacactgcagcgcgaacgtgaagatctttttctctacttatccctacttccaaaatgtaaatttgcgccccttggtgactgtccgcccttggtttggccctgcatgttgcagacctcatctcctacccacccgtaattacccccccaaccaggacaggtctgggcccggaactagagccttaggctagagttagggagggggcggctacaggaattggtgttcgggcctcgagccgtcccgcgggcctgactcagtcgcccttgctgtttgcagatggactacagcggccccccgagcggcgcccggcggcggaactgctacgaaggcgcctactacaacgaggcgcccagcggtgggtattccgggcctctccctgctcgctcctcctccttcatggagctgtcctggcctctatctaggacgctcccacccccactcacacacgcctatgtcctgggaagtggtgcaggagatgaaatactaagcaagtagctccctgtcttttcgattgtcccggactctaactaaagtcctcagtttccaatctgtctcaaagtactgggcccgggggtgggaggcttgtcgcggccccacccctgcttactaaccgagccctccccgcgcagaacccaggcccgggaagagtgcggcggtgtcgagcctagactgcctgtccagcatcgtggagcgcatctccaccgagagccctgcggcgcccgccctcctgctggcggacgtgccttctgagtcgcctccgcgcaggcaagaggctgccgcccccagcgagggagagagcagcggcgaccccacccagtcaccggacgccgccccgcagtgccctgcgggtgcgaaccccaacccgatataccaggtgctctgaggggatggtggccgcccacccgcccgagggatggtgcccctagggtccctcgcgcccaaaagattgaacttaaatgcccccctcccaacagcgctttaaaagcgacttctcttgaggtaggagaggcgggagaactgaagtttccgcccccgccccacagggcaaggacacagcgcggttttttccacgcagcacccttctcggagacccattgcgatggccgctccgtgttcctcggtgggccagagctgaaccttgaggggctaggttcagctttctcgcgccctcccccatgggggtgagaccctcgcagacctaaccctgccccgggatgcaccggttatttgggggggcgtgagacccagtgcactccggtcccaaatgtagcaggtgtaaccgtaacccacccccaacccgtttcccggttcaggaccactttttgtaatacttttgtaatctattcctgtaaataagagttgctttgccagagcaggagcccctggggctgtatttatctctgaggcatggtgtgtggtgctacagggaatttgtacgtttataccgcaggcgggcgagccgcgggcgctcgctcaggtgatcaaaataaaggcgctaatttataccgccgtggctccggctttccctggacatgggtgtgggatcc

SEQ ID NO: 9 - DNA, 11913 bp, Homo Sapiens
taaagcagggtgttactaaagaaagaaggaagaaattggctaaacgaatttagaacacaaataaaattactgcacaaataaaatctctgcttacgattaagctggaatggcggtcaaaaaagaaaagggaaaaaaaattcctagatgcaggtagatttctataattaagccatttctcaaaggggaagtaaatgtgacagaatatttagcaagcaaatttactgaggaatattttgttcctatataattaaattcaacactgaggtaaaactgacaactattaaactgagggcagttgggagagggaaaggggatgagataaaatccagtctataaaacattccattatcttttataggttaaaaaacacaaaagaaatacttggaaagaattgtctaagacggaaagattttaagattgtgtgactttttttttttttttttttttttttttttttttacaggtgcagaataattttttttccctctctcgtggtttttcttttccccatttttttcccctgttgtttgcaaagttgaatctggggtcaggagttctaattgtaacctcagactggaattccagatggtgcgctcaggactggaagcaactctcagttcatcaatttcatgggcctacgtatctgctctggccacggcctggcctccatccccactgtggcattaatgcagaacaaattgagacatatcctctatataattagttccagaatttaaaaagatttacggtataataatagaggcagtgccgcggaatcctttcactgaggactctcggggagctcggggaccatctcgcggtggcatcagaacagacgagtaaccccagcggctccaggcactgcgaactgggggagagggggaaattttgcaccgcattcggcagtacctaacggttccgggctcccagatagggtcagcgaggagagttaggacagtaagtggggactggttaaaaaaaatcgacttaattttgaaatgatcagaagaagctgggagtagttatcacaaagcccctcccttgcccccccctttttttaattgaaggaatgacgttgaaattttcaccgccagcgcggggctgggaaccatcctaaacacttgccctgcagccccgagtgggcagattccgaagagttggagtcggcggggaggggaggaacagctgttgggctgtcttgcgcgtggggctcggggcgcgggccccggggagaggcgctagtcgaaagcttgttcctctcccgcgacaggcagcagcgaggtcgagccactctttattacggcctgcgggccccgcgcgcagtgtggctgtccccgcccttgaccgaccgcagcgctttggggtgtttattcagttgtccgcggccgctgggtgactcccggagggcggcccaggcgtgcgcactggtccctggggttgcggctgtagcagcccagctccgcgctctgtcagatgcagtggacagcgccggggtgaaagtaagggttgagaaatcctcactgccctgctcctacccagcctcgattttttcatattgcaataattatgcaccttcgaggccgggatgcctgcgctttgccagtgtatcaacgccacatggttttccaggggctgtcctcgcctctgcatcccattagctctgaagaggtagaggggtggtgggtaaaacctccaactggacgttgagagacccgggtttcagctcggcgttgccactaacttgtttcctgtccttaaacagtagtagtaacaaaaactgtaaagttgattgagtcaaaggcccacactgctctcctatctaatcctcagaacaactctatgaggtgggcgctagtatcccattatcccgtttgaccagtaaggaaactgaggctcagagagactgcggaactcgtctagggtcacacagctgttggttacctggcagagctgaggttccattctggggccaccaaccccttgctctttaccgctgcgctccatagactgcctctccttcggctgtctgggcctcagtttccttctctgtaaaacgagaagtttaatctgcagctttctttgccaatcggtggttcagaccaggaacctctgctacagatctcggcgctgacaggggtaagaaggtgggtgaaagaagggggcgcccagttttccacagcctgcttttctctgggacctcgcgaagggcgggcctcgcgagctaaaggaggtacaggagagcgcctatcgtccgcggcgggtgaaggtgctacctgccttcgtgctaggctgtgagtcctggtgcttagctcagggcgccaaggccagtgtagctggcatgtcccccttggaaaacctcaggtctcccgcagagaacgttacccacaacaaagaagaggacagagaggcatggagcgccctgcgactgcaggagtacgtcagttccccagcgctggcttagtgtcgcctgggcttccgggcatgtggatccgttggggtcgtacggagacttcctgtcgggtccctggggtcctccgactgcggctcctcagcttagcactttcttcttggccccgcaggctgcagggaactcctcccacctctttagtcggagaagtccaagtcgggcgagggggcaccccggggttcgcaccggtgctcttcccctccccgcccccacaaggattctgagaaaataaatggcagaggagagaggagttctacatttgcttggctctcctttcctcctatccacccctacatccctcaccccggggcaaaaacttatttttgaaaaatgttggcagagatttacgtgtctttgccttacctgggtttcacaaacacaacgactcacattcaagccagcctcccttcagataacctcctctccccccgctaaaagtgccaaggatggtaaaagaagaaacaatctcaatcttttcgtttggaaatgaaagtccccggcttttcataaagggctcctcgcccctcacagttgagtcctagttaagaaaaacgacttccaagtagaaataataggcggggagaaggaagggagatacagggatctggggggttcttagggcaactggcagtgaattttgtctcgagagtcctttctccactcaaaaaaccaaacgcgcgagccccgcgaaaggtttagggatagatcgtgtgggagaggactgagcagagagcgtgggggcagtgtcttgtagaatctttcttttcttaataataattttaaaagcttctgagtggagacgacgcaaagtcaagcagcaaaggtggcctgggaggcaagcggagggctcaagtgccgcatctttaccctcagggtctcctgcgcctacgggatgcgcattcccaagaagtgcgcccttcgagtaagtcctgggcccgcacacacttcgggtccgcagccagaatttaatggcgacaacgtttatgcaatgcaagctaaaaaccaaagcgtaaaaaattactatgtcatttattgaaacgccattctttgtcaaactgcaactactttgcttcacataagtttggctggaaagcttgcagccccagcccgggccagccaggtacaggaggccggactgcaaccggttgcttccctcccgtcgcgcctggccgtcccacgctgcgccgtcgctgctgcctcctggcgcccctgggattttatacgcacctctgaaacacgctccgctccggcccccggttcttctccttgcctaggggttgtttcccaatagatactgactcctttagaagatccaaaaaccaaaccaaaacaccccctacccgccccaaacacctgctctggggcgcgggggctgccaaacagagactagacgaagggagtcagatttagcgaagctcttcgagctcccaaagattcgaacactaactcgcgcccgtgggccgatggaggttctccctactccactccttggtccccttaactggcttccgcctcctggtcaatcactgagcaaccagaatggtatcctcgaccagggccacaggcagtgctcggcggagtggctccaggagttacccgctccctgccgggcttcgtatccaaaccctccccttcacccctcctccccaaactgggcgccaggatgctccggccggaatatacgcaggctttgggcgtttgcccaagggttttcttccctcctaaactagccgctgttttcccggcttaaccgtagaagaattagatattcctcactggaaagggaaactaagtgctgctgactccaattttaggtaggcggcaaccgccttccgcctggcgcaaacctcaccaagtaaacaactactagccgatcgaaatacgcccggcttataactggtgcaactcccggccacccaactgagggacgttcgctttcagtcccgacctctggaacccacaaagggccacctctttccccagtgaccccaagatcatggccactcccctacccgacagttctagaagcaagagccagactcaagggtgcaaagcaagggtatacgcttctttgaagcttgactgagttctttctgcgctttcctgaagttcccgccctcttggagcctacctgcccctccctccaaaccactcttttagattaacaaccccatctctactcccaccgcattcgaccctgcccggactcactgcttacctgaacggactctccagtgagacgaggctcccacactggcgaaggccaagaaggggaggtggggggagggttgtgccacaccggccagctgagagcgcgtgttgggttgaagaggagggtgtctccgagagggacgctccctcggacccgccctcaccccagctgcgagggcgcccccaaggagcagcgcgcgctgcctggccgggcttgggctgctgagtgaatggagcggccgagcctcctggctcctcctcttccccgcgccgccggcccctcttatttgagctttgggaagctgagggcagccaggcagctggggtaaggagttcaaggcagcgcccacacccgggggctctccgcaacccgaccgcctgtccgctcccccacttcccgccctccctcccacctactcattcacccacccacccacccagagccgggacggcagcccaggcgcccgggccccgccgtctcctcgccgcgatcctggacttcctcttgctgcaggacccggcttccacgtgtgtcccggagccggcgtctcagcacacgctccgctccgggcctgggtgcctacagcagccagagcagcagggagtccgggacccgggcggcatctgggccaagttaggcgccgccgaggccagcgctgaacgtctccagggccggaggagccgcggggcgtccgggtctgagccgcagcaaatgggctccgacgtgcgggacctgaacgcgctgctgcccgccgtcccctccctgggtggcggcggcggctgtgccctgcctgtgagcggcgcggcgcagtgggcgccggtgctggactttgcgcccccgggcgcttcggcttacgggtcgttgggcggccccgcgccgccaccggctccgccgccacccccgccgccgccgcctcactccttcatcaaacaggagccgagctggggcggcgcggagccgcacgaggagcagtgcctgagcgccttcactgtccacttttccggccagttcactggcacagccggagcctgtcgctacgggcccttcggtcctcctccgcccagccaggcgtcatccggccaggccaggatgtttcctaacgcgccctacctgcccagctgcctcgagagccagcccgctattcgcaatcagggtaagtaggccggggagcgccccctacgcgcggggcagtggcgccagggactctccgctctaggacacccccctctcctaccccttttgaccgcagctcttacccagctgcttcccaagggccgtgaggatagcggaagcggcggctggggaggaggccggagagtgggagtgcacgcaggcactggcccccgacatcctccaaagccaggcagagctaggagcctgactgttcgcaagagccgggagggcgtctggggccccttagagtccgagagattccgggactgctagtccccacgggagtggaaccaggagaccggcgcagtgtctggctctgccttggggagagttttgttaattaaggaaacgccaaattgtcaccaagcgtagcgcttttcagacgtctggactctggattcggagtgggaccagcgcgggggtgagcgcctgtgctgtgctgcctccgcagcgctaaaatgtccaggagcacctccagcccttataatacggtgttggcacacacttaggtgcacattaagtatcgtagagaactagaatgagcacatgcacctccagtaactaaatggctttctggaacagcgtcgtgtccgtggatagctcccgcgtatggtaatacagaagtggatcttcactgggcttcgctcaggcggcggccacgcaggttctggggatggaagagaacttgacttatccgagtccaagctatgcgggaccaggttctaccgcaggcagtggaaggaggcacgagctttggcctttctttcagcgcatctggggcgcctcttcatcttgtaaacgcggggctcagctgggacagtatttcttcaagacctggggttagaacaaggacagggttattcgctgtgcttagtcaggatacaaggagggaactcggcacacgataagtatcaggttggtttctcatcccgcgccgatgcccgcccacctctctttcgcctgggcggcgcggacccgaacctgcggagcccctgtagtttgccctcttcatttattttcagtggatttccacgctattgagaacctaagccagttcggtttgattcggtaatttagtaaacgctttactaatacaatggcggatgcttttcctggagcaaaattactcgagggcctagggaccgggatgtttttggaatgcgtgggaagcagagtgtatcttttgcaggaggtaccttcgcccaaggctcgggagaagggctctgcccttgttgcccgccttcacccgcgccttctaaacgcgcgtcttcaggccgctcctaccttagcctaaccaggagcacccggcccccgcgaagccttggagaaatcgaaaccgcccttttcttcgggagaatctgggatcactgtcctgtggaggaaccgcaagcagacccaagggttgcctccactctatgcttttagttagtgaaattagtgttttgtactcaaggggcgttgggacaacttactggtcgctgaggcttgtgttctttgatcagatcgcgccacctttgtttagcaggctggtgttacttttggggagtttctaggtctcagtgtccccgtctataagaggacagctgagatgggcaacctggagattgggtccggcttgaagttatactccatagatgcagaagcgctacccaccaccctcttggggctttaaatatggaactcggcaacccatctaaacatctgtgactgagaaacaatgaatccgagagcactgtctgcatgtgtgctatttggaggcggttgagaaaccatcgaatccatgcccctggggcacaaaatactactacgccattatctttttagtacttctaggggatttttgaaacctgggttctgtcgcttcgtttgggtcccttgtccagcccttttcagggcaggtctggtgcctgggatcttatcacatgtcgtggggggtgggactgtgggttttgcagccagcaggcattacacttctggaaaatatctggattcttctgtaatatacaggcgtggctgccatggagaaaaagttaaaaggggaccaggactagtaggtgaatgtatccttcttctccaccctggagaaaaagcccaatggagagagggccctagattcaagtcatatagcctggaagcaccatctccaggtttaagttttgtcttgcagtgaaaacagatgggtccatcttacccagcccttgaggctcattgggcagcttggatgtgagaagcgctccggctgctatcctggagtgggcaagggtggccctcgagattctgggtttattctttggatttccagggttcctgctgcttccccaggaatgcagggcctggcccaagacttgggctgtgagaggcaagggcatcaactctcaaaaatgtggaaatggccatcagagcgccaaggccaaaccccaggggagaggaatcaaggccgtctctggatccctagggcagtctagccatggtgcacaggcaggggcaattgttggtacccactcacaaccgcccaaaacttcacaagcatgttcatattttaaattcttaaatattatatcttgcatcctaatcttgtaaacattaatttagcaaacatcaatcgcctacttggtcaggcactgggttctgaatattaattaagacaatggcctcgagaacctttgcaagaagctcaccagctaatcctggagaggccccttgttttggatgaggaaatccaggttctatgagattaggtggcagaggtgggatttgaacccagaccatgctagggtgtttctactccttttccagggatcttggccccaccgttgagatggatttcttctggcctgcgggaggggcaccaaactcttagtccatgtgtgggggttgacgggtttgtgagggcagatgtggggtgaggacttgagtagccccagactagatgcaaggcttaaggaggaggggaaaaaagcttgcttgggccggacgcggtggctcgaggcggttggatcacctgaggtcaggagtttgagaccagcctggccaacacggtgaaaccctgtctctactgaaaatacaaaaaaaaaaattggccgggcttggtgacgggcgcctataatcccagctactcgggaggctgaggcacaagaatcgtttgaacccgggaggctgaggttgaagtgagctgagatcgcgccactgcactgcagcctgggcgacagagcgaaactccgtctcggaaaaaaaaaaaaaaaaaagaggttgcctgctagtccactgatcccgcagccccgcaggctcgcagaaccctaaggcatgattaggcctgggatcatcaggccaccctagggtcaggtgcggaggcctgcgacgcccgagggccaaaggctccctcttccggtcacacaggagagggtattttgttgggggacaggttttccccaatcacagtgcagctgcagtcatcgttttcagccttctgagcaccttcctggctgagcctgctgtccatttcacccctcagctctcacggcccggccaggccaggcggttcccggcttctctgcagccgccggcgggggaggagggcacagagcgcgtctcgcctcttagcgcacggtcaaggttgcgctcccctcccgggccgggactaaccgtgggaaaggcgctaccttggccactcgattctctccctccaaggcctgtacaaggagcctttgaacacgctgctccttccagccggcagctttacctcccctggcccctgcccccgcactctccgcgccaggccaagcgctgggcccagggacagcgcgctctaatcaaacccgtgtccgataagcttctaattaaaagagacctccctccgctccgcaggcgctttcaccactgcccctcccggggggacctgaaggagagggtttgaggccggtctttgcccgccgaggtctgcgtgtccggtctgggaggaggcctaggagggctcgcgggccacgggcatccttgggcccgagttctggggtgcggacggacgtctcgagagtgggtgccgcgactcgggacccacggccctcgccgggcacggacagttgcggagcagggctctgaggattgtgcagtgccctgggtccctgcctactcctgggctcaggaatggagaagggttcgtctagagaaaacttcttcgtagcttctatttcgtctctctctctctctctctctctctctctctctctccctccctctctctctctctctctgtgtctgtctctctttctctctctctctttttagtgtcctttcagaaattcggccttcactccgggcaatagtgggtgccctgagccaaatttcgtttgtaagctcatctataggcctcaaagaaggccaggcctcaggtttcaaaaggaagtctgtggaagcccaaacgtgctcgcccatgcaggagagctaacggggccgggggttatctttgcccacttagcaggagagaaatggaggccctcgaggtcatatgataaaagctagtggcttctcaaatccccagtgtgtggtgctgagcagtgtgtgagacttaagcctggacctgtactatccgggagttaggatttgccccctccttccctcccttgcactctgccacaccaccctccaggctcatgcctctgttgccccagagaagctttttttttttctttttctttttttttttttctgggcggggggtggtggtgtgtgtgcatgagcgtccgtgtgtgtttcgaaaatggaggtaacgatgccctgggtcctgctcatcggctgagtcctgcttaagtctttggaggcactttggtcaaatagtgcaagagtgggagaatgggtgctgtttgacccaatttactcctgagaattttgtgaagtttggagacccagggcagtcctgggccaggaggatctgaggctgctggggtggccctgccaggatcccataggagcagctctccttagccattgtgtctggacttcaggccacagactccggaacttgtagaggaatgagaccccatccttgggttccggggccaatgacgtatctttagccgaaggatccttttccccagaggcagcaacagctttccagaagcttgtggggtataagtttaaagcaatttaataacaaaaattataaaagactatgttttccaactgaggctccacgctctttttctcactttgggggggggggggaatgctaggatttccctagggggaaactgaggcaaaggaccgaagcactaccatggagggaaagggagatacagtgtcaggcacactctaaaggaaattggttgtccagcctggggagtgaggaagttggctcctacagcagtggtcagggtcggacccctgggcgcaaggtgggtcccataggggggaggaggaggagagcgcagggtcgccatctgaaggcccaactggaaggggcccttgttttccccctcaccagctttcccttgggtgtcatggtgtcaggtcgggtagccccagacagataacattactcggtaattactcttcccatttttaagaccaggccatttaactggctccgagtaattaatgaaagttggtgcgcgggcccctgatttacagctcggagtcaacgcggggttagcccagcagattcatttcgcttgcccgcgctgctcctgcggaagagctgcagtttatttttggggggtgaacaaccttctctgtcgatcaggcaacgagttttatacttaatttgccaggggttcgctgcagaagcggcagagaccgtagaagactgcggcataaataaattgggaaaaagcgaggtgggggttttagtcagaaaaggatggagaagcctgtcccaaggtcacatccagggacttgggccgtcttcctgccgaaagtcctggaggcttgtggggctggattctcctccgctgggggtccgaatgcggggttcagcgcacaccccccccgcccgtggctggttcagacccactgccccgtcttgcgagagcaccgctgacactgtgcttctctccgccgctcccgcagg

SEQ ID NO: 10 - DNA, 4316 bp, Homo Sapiens
ctgcagctaataaaaaaaaaaaaagaaagaaagaaactggtctctgtcctatttcatatgctcaggtacaacttttccagagaagaagaggaggggggcggggaggagcaggaggaggaggaaagaaggaggagaaggagaaggagaagaagaggaagaggaagaggaagaagaagaagaagaagaagaggaagaggaagaggaagaagaagaagaagaagaagaagaagaagaagaagaagaagaagaagaagaagaagaagaagaagaggaagaagaggaagaagaagaaactgtctctagaccttcattctcaggacaagttcattgtctggcaccaagctccttggggtgaattttcttccaaaagagtccggggagtccaggtatggaatgggaggcagaaagttcaatcaagggactgggatttcggaatgaataatgaagggagatggactgggtccatgccgaaggtttctccctggtttctcagcccccgggcgaagactcagggagacattgagacacaccctgcacaggagggggagggggagggggagggcaaagtcccagggccccaggagtggctctcaagggctcaggccccgaggcggtgtctggggttggaaggctcagtattgagaattccccatctccccagagtttctctttctctcccaacccgtgtcaggtccttcatcctggatactcataacgcggccccatttctcactcccattgggcgtcgcgtttctagagaagccaatcagtgtcgccgcagttcccaggttctaaagtcccacgcaccccgcgggactcatatttttcccagacgcggaggttggggtcatggcgccccgaagcctcctcctgctgctctcaggggccctggccctgaccgatacttgggcgggtgagtgcggggtccagagagaaacggcctctgtggggaggagtgaggggcccgcccggtgggggcgcaggactcagggagccgcgcccggaggagggtctggcgggtctcaccccctcctcgcccccaggctcccactccttgaggtatttcagcaccgctgtgtcgcggcccggccgcggggagccccgctacatcgccgtggagtacgtagacgacacgcaattcctgcggttcgacagcgacgccgcgattccgaggatggagccgcgggagccgtgggtggagcaagaggggccgcagtattgggagtggaccacagggtacgccaaggccaacgcacagactgaccgagtggccctgaggaacctgctccgccgctacaaccagagcgaggctggtgagtgaacccggccgggggcgcaggtcacgaccaccccccatccgccacggaccgcccgggtccccccgagtctccggatccgaaatctaccccgaggcagcggacccgcccagaccctccacccgggagagtcccaggcgcctttaccgaggttcattttcagtttaggccaaaatccccgcgggttgggcggggagggggcggggctagctgggcggggctgactgcggggaccggctagggtctcacaccctccagggaatgaatggctgcgacatggggcccgacggacgcctcctccgcgggtatcaccagcacgcgtacgacggcaaggattacatctccctgaacgaggacctgcgctcctggaccgcggcggacaccgtggctcagatcacccagcgcttctatgaggcagaggaatatgcagaggagttcaggacctacctggagggcgagtgcctggagttgctccgcagatacttggagaatgggaaggagacgctacagcgcgcaggtaccaggggccatgggcgccttccctatctcctgtagatctcttgggatggcctcgcacaaggttgggaggaaagtgggcccaatgctaggatatcgccctccctctagtcctgagtaggaagaatcttcctggctttcgagatccggtaccagagagtgactgtgagagtccgccctgctctctgggacaattaagggatgaaatctctgagggaatggagggaagacagtccctggaataccgatccgcggtcccctttgagccctccaacagccttgggccccgtgacttttctctcaagttttgttctctgcctcacactcaatgtgtttggggctctgattccagtccctcggcctccacttaggtcagggccagaagtccctgctccccactcagagactcgaactttccaaggaataggagattttcccaggtgtctgtgtccaggctggtgtctgggttctgtgctcccttccccaccccaggtgtcctgtccattctcaggttggtcacatgggtgctgctggggtttcccatgaggagtgcaaagtgcctgaattttctgactcttctcagatcctccaaaggcacacgttgcccaccaccccatctctgaccatgaggccaccctgaggtgctgggccctgggcttctaccctgcggagatcacgctgacctggcagcgggatggggaggaacagacccaggacacagagcttgtggagaccaggcctgcaggggatggaaccttccagaagtgggccgctgtggtggtgccttctggagaggaacagagatacacatgccatgtgcagcacgaggggctgccccagcccctcatcctgagatggggtaaggagggagatgggtaaagaggggaacgaggggtcatgtcttttctcagggaaagcaggagcccttctggagctcttcagcagggtcagggctgaggcctggagatcagggcccctcaccttcccttcctttcccagagcagtctccccagcccaccatccccatcgtgggcatcgttgctggccttgttgtccttggagctgtggtcactggagctgtggtcgctgctgtgatgtggaggaagaagagctcaggtaggaaggggtgaggagtggagtctgagttttcttgtcccactgggggttgcaagccccaagtagaagtgtgccctgcctcattactgggaagcaccatccacactcatgggtctacccagcctgggccctgtgtgccagcacctactcatttgtaaagctcctgtgaaaatgaaggacagattcttcacttcgatgattatggtggtgatgggacctgatcccagcagtcacaaatcacaggggaaggtccctgctgatgacagacctcaggagggcagttggtccaggacccacatctgctttcttcatatttcttgatcctgccctggatctacagttacacttttctggaaacttctctgggatcaaagactaggggtttgctctaggaccttatggccctgcctcctttctggcctctcacaggacattttcttcccatagatagaaacagagggagctactctcaggctgcaggtaagatgaaggaggctgatccctgagattgttgggatattgtggtcaggagcctatgagggagctcacccaccccacagttcctctagccacatctgtgggctctgaccaggtcctgtttttgttctaccccaatcactgacagtgcccagggctctggggtgtctctcacagctaataaaggtgacactccagggcaggggccctgatgtgagtggggtgttgggggggaacagaggggactcagctgtgctattgggtttctttgacttggatgtcttgagcatgaaatgggctatttagagtgttacctctcactgtgactgatacgaatttgttcatgaatattttctctatagtgtgagacagcttccttgtgtgggactgagaagcaagatatcaatgtagcagaattgcacttgtgcctcacgaacatacataaattttaaaaataaagaataaaaatatatctttttatagatacaggtagatatgtttttatagcatgcacgtaaatgtgtgtgtgtgtgtgtgtgtgtgaagagaaagagtgaatagagagattaagattcttttaatggtgaaaagatatacatatatttggaattagccagcttgactcagtttaggtgatcccaattttggtggcaacaaccaaagcatcgtagtcaggagccagtcgaacatatgccttcctctctccatcagactgaatcagagtgttgactttggccacatcaatgtcacaaacttcttcacagcctgtttgatctggtgcttgttggctttaacatccacagtgaacacaagtaggctgttgttttctatcttcttcacagcctactcagtggtcagcggaaacttgatgataacatggtggtcaagctt

SEQ ID NO: 11 - DNA, 14147 bp, Homo Sapiens
gggggcactgagcaatacacttagattaacaacatctcacaagtgtgagtaccattgatttaaacttctttgttggttgtgttttgtgtttatgtctgttctacattcattttttccagagttgcctcccttagagtttcagtaatttttatcttttcaaacctttccagccatgggaaggactagcaggtgctagtggacccaaaagaacctcagacctgctgagatttctgattcttggtgttcagaccaattagcaaatagtttaattaaacggcctgctttcatggtcaacacaattctgaactggtggtcatttagaccaagtccactttgtttttgagacggaattttgctcttgtcgcccaggctggagtgcagtggtgcgatcttggctcactgcaacctctgcctcctgggcttaagggattctcctgcctcagcctcccaagtagctgggactacaggcacccaccaccactcccgactaatttttgtatttttagtagagacagggttttgccatgttggccaggctggtctcaaactccgacctcagatgatctgcccacctcagcctccctaagtgctgggattgcaggtgtgagctaccgcgcccagctaaagtctagtttgtataagaaggctttccttgttatgtcacaggattcctgagcctatcaaatagattttaatgttttgagactccacgtacttccccaaaatgaagtatttaaattgtcagtgcctgcccccttgcctggtctttttgatgtactgacctggtctgttagtgtgatgaaaaatatggttgagtcttactgctttattgtaattagtaggactgtctagaagtttaatttttctaagagatgaagatttgagtctatgtagctggctgtcctttaaaaatatttggttacttgggatatactttgaactaactttctggtcattttatgtgatcaaaagtgtcagttcttcctgttcttagtatatttctttgtttgggaagtggaagggatgaaatctctatattctttcctgatgacacagaaaggagtacacatccacatctcatgaatagacatgtaattatagaagaaacagcctaacggccgggcgcggtggctcacacctgtaatcccagcactttgggaggccgaggtgggtggatcacgaggtcaggagttcaagaccagcctgtccaagatagtgaaaccccgtctctactaaaaatacaaaaaattagccgggaacggtggcaggcgcctgtaatcccagctacttaggaggctgaggcaggagaatcgcttgaactcggagggtggaggttgcagtgagccgagatcacgccactgcactccagcctgggcgacacagtgagactccatctcaaaaaaaaaaaaaaaagcataaccatatgactattcacactgccttacatactaaatcagtagtaatttgcttctcacatagcaaataaaaataaatcagcagtaataaacatatcccttttgtgttacagctagcatttggtgaactctgtatttttctcccttttaaagtgttgaactcataggttttcataaggtaagcttacaccattaactaattttgttctcttttttgatgttaaaattgtcccttaggagctgatcaggttcattcttctgttctttaagcattacccccagaatattcttgaaagtattcttgctctctggcaacaacacccatacttcatttatttcctgtccctaaacatacactcagccaacctcaggttccttttaatggagtagtcacttattcattcaacatacgttgggtgcctcctctgtgccacacactgttctggtccctggggatagagcaggaaacaaaaaaaaacaaaatctgccctcatacagctgacattctagtcaggggagacaaacaataaacaaatgaatgatgtagtatgtcagatgttgacagtgctatggagaaagcatatcatggagatcagaagcattacctgcaatggaacagtcatgattttaagaagaatggctgactggatgtgaagtgtgagagagaggagcccaggtttttggctgagcaactggagggatggagttgccattatctgagatggagaagttaggggaggagtagatttggaggggaaggtcaggaatttagtctggaacctgttaagtatgaggcacttattaaacactgaagtggatttttagaagatgtcattaaaactagtcaagttcaggagagagttctgggctagaaataaaaatgtgggagatattggtatatacatgggttcatactacttttttttccaatttaacatcctatcttattgctctctgcttttccaacagtatttagtttcatttacccctcaaactgactcctacattgacagcacaataaaatccacattccttattatattaagaccctgtgtgatctaacctcttcctatctcttggaccttgtcttaggccactttccctccccactcaatttctaacactctgacctcactgcttctcaaacagctctttgttgcctcttgtcctttttgtggaaaaggccttcctactgcttaaccattaggcattcttcgattccttctcattcttcattcttgagaaaggccttccttgaccctttatatcaattaggattcttttgggcgagatctgatccaaactggcttagagaaaaggagtcaactgactggttcatgtaattcaacctccttcctctgctgcaaccttcccttggctcccatctcacttaaggtcaaagccagggtccttaccatggccttgtaggcttcacacagtttgtctccctcattacctctctgacctcacctcttacattcccccttcacttattcttctccagccagagtggcctctttgctgcacctcaaacatgccaggcacactcccacctcagtgcctttgtgtttgctgccccttgtgtgtggaacacatcctccatatagccacactactcaaaattcactgtctttaagtctttactcaaatgcttctccgtgaagccatccctgagccctctttaaaattgcagccccccactcctgtactccttattgtctctcatttttaatttttgttattgtagttagaaccatctgacacatagcttttattccattggttttttgttatgtctttctttacaagaatttgaagtccatcaggccgggagttttgtttgttgtgtttgctgctatctcccagtgcctaaaattgcctggcatacagtaggcatttaataatctttgaatcagtgaaaaccagatggtggcttggcatttccacataggaatgagccaggtggaaatcatccaggatataagtagatcttgaagtgataaggaagggtcatcataatcatgtggggcccattttgccctttcttgtttcttttctctaggctcagcaacagcctcaccaaggactccatgaatatcaaagcccatatccacatgttgctagaggtgagagcagctcaccccactaccagactctgtgtttagggtggtgacctgaagaaggaagagagcgaaagaagggaaggaccatctttccctctaaactggagtcaagggagggaggtcagagcaagcctgggggcgtaacccagacccagtctttgttcaatctcttctgtcctctttttcaggggcttagagaactacaaggcctgcagaatttcccagagaagcctcaccattgacttcttccccccatcctcagacattaaagagcctgaatgcctttgagtcacatggcccttctttttccccataaaccctgctagttgccacgggggcctgttcctagggcacaaagttactgagagacccagagatccagtctctctgtggaacctccaaaatgccccagcagtcctgcctccagcctgttgcctggcagtatttgccagttgaccttatgcactgccctctcttctgtcatcttggcaacctgggccccccacctcaccctttcttccattccttttcctagacgccaccctttgaattgccatagagaatgggccaattcatggtggaggtttgttcattcccacaacaatcaaagggccctaaggtttacgctttcacacacccaatcattccccaggtaccccaaattacacccaaaccctaactcagccctaccttgtcttagcccctgcttgtaagtgttccagcttccaatgggcacagacctggatcccgctctccctagtcgggcccctattctaggttgagtccagccaccgccaatcaatgcagagccaggttcctcccctttttaactctggccgcagttcaaccctgccctctgaaagcatttcgtttctgccactcaatgctctttcgtgtgcctgacagccatcctgccctcctacctccgctgtgttctaaattcgtctttacccagctctatggtcttgtctaaccgtagagctgccctgcccgcctacgcggagcccagtccgacccactcccgccggctgctacgcccatttctatacaagccctgcttccgctgagcagcatggcgtgcgacaccgcccccttggtgttttggcaggggtctagaagtccctcgtccgccaatcagagaaaaacagggccacccacccccgtccttgggggctgtcttccatcaatcccatgtaagccaatcagtgtgaggcagacccccgcccccccgacacaggccccgagccttttcagttgctcacagtccgtcagtccttgagccaatcggcgtggagcaccgtgaaggccgaacgcgcctcctcgggactccaggggccgtgagcgttccatcatttccccttacgccaatcacggcacagctctgtagggaagggcccgtcccccaacccctcgaggccttgcggccgattaatagcgctttggccaatcagcgagcggcgggacattgggctcctcctcctcgggcccacgtgagctgtagggaaacgcaggggcggcttctaggtgctgccgccgccaccgccaccaccacctccaccgccgcctcggaacccaggcctggggggcggtggggccgcgtatggagcccccgccccccggagctgccaacattgccaacgccaccgccacgctacacacaggtgagctctgggcctggagggtggagggcccagtccgtgaccccacgtatccttcccgcccccgcgcagaggatgtggcttggccggtggcctgctggtgttcgactccccgccgccaccaccacggctggtggacctgcgtgtggcattgctcaagcccttcgtcccttatagtggatctgaccgtggcctaacctccccctcccgttgtataatggatcggtctgcgtgcttatgtttttccccacgccaacttagggtggactcgtccataggctttccccctacccctacccccacccgccccccacccacccccacttatagggagctagcctgtgacagtgttcagcccccttaatagtaggtgtatctgagtgtttggatttctcctagcctcaactttcaggagacccgtccgtggccttatttattccacccttcctgtacatcgtagcgaatcaatccgtggcgccgcactcctccgcatccctctttaacagtgagtctacctgagtttgtattcctgcctcctccagtcccccaatgcatcagtccatggcttttttcaaaaccaccccccccccccaccaccaccaccaccattttatagtggatcagtcttcatgtttggattcacgtccctttagctatcagtccattgccctgtctcctctttttcgtagactgtcgctctagcgcttggggttctctcctttttaatagtgggttagtttagtgctttacatctccctattttcagtagctcagtccatagccttttccctctctgctttgaatcagtctgtgtgatggcttttctctcctctcactgtggtgcaggagtctgtaaggttttctgctccccttcccctcagacgatgagcctcatcacccctccctttgcagtggatctgttcattggccttcctcccccacacccctgtatgcttgcacagtcccccgcataccctcccgtgagtccagtgctttgtaattgggggaagatcggccgtgtactttcaatttccttctctttttttttcccttcccagaagagaacgtgctgatcctcttttccttgtgatggagcactgtacggccttccctgtcctccacctcttaatagtgggtcagcctggtcacactcgtaaccacaaagacgttctgcctcactacaataagtgaatacattagcgccagtgatgatagtaatgccaataggagctagcgtttattgagcacctgccgtatatcaggcagagtgtttcatatgaatgagttcctttaatcctcaccacaaccccatgagataggtagtgagggaattgggccatagggaggttaaattccttactcaaaggtggcccaggaagtactcaggacacaggataatttttgaggctcccctcttagatctcatcccaccccacgtgaggcctcagtccttaaaaaccaaattagttctcacctccaagcttttgttcttgctgttccctctgcctgcagagcagtcttcattcctcaccttctctcagcacccacccaccccccaatcccagcagctgtgtgaccttagatgagtgatttaaccacttcctctctgtgcctttttcttcatttgtgaaatgggggatcagaactagaatcccttccagtgtaaataaatattaactgtgaattaatggtaaaacaagtaacctttctagcattaccgcctataccttcccacccccttactgtgctccaaccacactggttccaccacacagctcctcaaacatagcaggcatgggccagcctcagggcctttgcattggctgttctttgtgccttgaacaccacccccagatctctgcatggttcctttcagcactctgttcaaataccaacccccaaaggatgtttaccacactgtggtgtgtggaatgcagtataaaaagatacatgtatgaaagatgtttctaagaatgccagtttatatatgagtaagggttttcctccttttcaaaaggatgtgttcacaagactgaggtacgtaatatgctctgtaaaggcataggtataaaagctgtttctaagagtgctagttgtatatgtgaataaggactgtgttgttgcattgaaagaatgtgttcacaaaactgtggtgtgtagctgggcacaggggtgtgcacttatagtcccagctactcgggaggctgaggtgggaggatagcttgagcccaggagttccaggccagcctgggcaatatagcgagatccctttttctgaaaaaaaaaaacccaaaaaacaaccactgtggtgtgtgtaatacactctcttaaaggcacaggcgtaaaagatgtttctaagagtgatttgattttgttgtacctgggtagtgttatttcattaaaggttgattgtcacaccatggtacttagaatatactatacaaaggcacatgtataaaaaagaagttcctaacaatgctacttgtaaaaacaaaaaaagtcaacccctccctgaccatctgaagctgcacacccagcagggctcaagccaggtccctgatttgtcccgttgccctttatcactgtctgacacactgtgtgggttacttgtttgttgtctgtctctcctcattagaatgtgagtcccatgaggactcagtttttgtctgctcattcaccgctatgtctccagcaactgaaaatgtaccaggtaaacagcagatgctcaataagaatttatcccatgaataaatgggaaaaagataatttgagacaccagtgtaggggtcacatgaggaagaagaagggatatgagagctaattagttgggactgttcctgcaaccaacctttactgagccccttgtgagtaccaggcactcttctaggtgctggaatatggcaaggaacgaaacagggcgaaatatttgtgcttgtggagctgacatttattaaaagttggggaggctgggcacggtggctaacaccagtaatcctagcactttgggaggctgaggtgggtggattgcctgagctcaggagttcaagaccagcctgggcatcacggtgaaaccccatctctactaaaatacaaaaaaattagctgggtgtggcggcgtgcgcctgtaatcccagttacttgggaggctgaggcaggagaattgcttgaacccaggaggcggaggttgcagtgagccaagattgcaccatgcactccagcatgggtgacagagcgagactctgtctcaaaaaaaaaaaaaaaaaaacccaagctggggagacagactatgtgaacaaaataaataagtaaaattagcataatagacaaatgctgagaagaaataatgaaatagggcaggtaggaatcgagtattgggggtggttgaaatcttaggcatagggaaggtgactcttgaattagggcctcacggtagagacggagagagccttaatgtctacgggaagagcataccaggcagaaggaagtgccagttcagaggccctgaggtgggatggtgcctgccatgttcaaggaacatcaaggcggccagtgtggctggagcagagtgcggggaagggtagaaggtgaggtcacacaggtgatgggagccagatagtgcaggtgatacataggataggattgcaggggcagggggagaaggatgacacactagctaatagctaatatctgtggagtatctgccacacatcagaggcacttttctgttcaaataccaacccccaaaggatgtttaccacacggtggtgcctggaatgcactacaaaaagatacatgtgtcaaagatatttctaagaatgccagtttatatatgaataaggattttcctccttttcaaaaggatatgttcacaaaactgaggtatgtaatatgctctatggaggcacaggtataaaagctgtttctaagagtgctagttgtatatgtgaataaggactgtgttgttgcattgaaagaatgtgttcacaaaactgtggtgtatagctgggcacagaggctgaggtgggaggatcacttgagcccaggagttccaggccagcctgtgcaacatagtgagatccccgtctccgaaaaaaaacccaaaaaataaccactgtggtgtgcataatacactctcctaaaggcacaggcataaaagatgtttctaagagtgatttgattttctggcacctgggtagtgttatttcagtaaatattcattgttaaacactatggtgcttggaatatactatacaaaggcacatgtataaaaaagaagttcctaacaatgctacttgtaaaaacaaaaaaaaaagtcaacccctcaagtcttttacagaagtattttacagaattgacacagttaatcctcacagaagccttggagggtaggtgtacttttgagaatatttgactttgagagtaaaatatccccattttacagatgaggaaacaagcaaagagaggctgagtaacttgctcagggtaaccttgagccagaatagccagaacaggggcagaggaacataaggctgaagactcagaaagaagaacagatttgcaagggcaggcaggttatttggcacctttgatcacgcagaggaagaatgaattcttcctggaatgcgatgattgtgtaattgagtccatgaagtgagggaagagctctccctgcggggagagcagcccgtgcttaccctcagaggttggaactgtctcgggaacggtagatagttcagggtggctgcctcagagcctttgtacacgccgttcgctccgcctgaaggccctcccccacagagggcagcctggcttgctacctcccctccttcaggccaggtgtcacttccttggggaagaactccttgtacaccctgtgtaaaaacagcattcctgtcactctctaggatcttacccttctctgtttctcttcatggagaactggtggtgtaaggcgattgctcactagagccaaaccacttaggttttgaattccggctctgccaacttccagctgtgtgacttggggcaggttacttctctgtacctccattgcctcatgtggaaaatgggggaaatgataatccccaccctttaacggtggtttgaggattcaatgagttaaatgattcaaagagtgtgcagcccacggtaaggatcgtatgcctggcttgcatttttaaattattaaaatgtattcatagcatacccgtagatgtctgacaggcctctgaaactgaccatctccaaaactggtgtgacccccctcaaaacttactctcctgcaaggctcccacctcagctgaccacaatgctgtctttgtgggtgattaggccacaaacctagactcaccctggacccttctctcacctcccccgggcatgctatctgtcagcaagtcctattctgtgttcaggctttctccagaccccagctacttctcgccagccccactgctaccaccatcatctaccgcagtggcttcttcagccccaacagtctgttcttctcacaaccgccagggggatcctgttgaaatctcagtcacagcctgtcatccctctgttcacaaccctcttgtggctcctgtctcactcaacatcctgacagcacccgaaaaagcctggctcagtctggcccccgtcactctgttctcctctcccgctgcctccctcctctcccccgaacccatgtcagcctcctctccccatgtcacctgccaggcactctccagccttgggcccttcacaccggctgccgcttccacctggcttgctgctctcagatactcacgagctcagttccttcacctccttttggtctctgcccagttgtcccctccttggcgactactctcccctgactctccatgtaaaagtaacagctctcccctgcttgatttttttcccataacccttaccaccatctgacgcactcttgtacatgtttgccttttttctcatctgcctttcctgctaagatgtgagctcctctggagcagggattgttgtctgttgcgttctcgactgtatccgcagcacctggcccacagtatgcactcaccaaatgcttgctaagtgaaggagatggaaagaagtaaacatatctaagcaaggcagattactagaactcttatgaggggtcaagtgggagaaataacaaaatacaaagccctgtgtgctgttgaagctggaagcccaccgtcacctttcactcagctgataggttctgttgcagctgaaagaagaactggtaaaattgcctgtctttgccaccaggagtcactctgaactctttggacttctgaaacaagcctgcctgcaaaacaaattcagtgaggtctctggtgacaggactctctaatcggacacttcatggctttgtgacttgtataattgaacaggaagctcatgtttatttccagtttgctctcaggaaagaaagcagtaatggggtgacagggaggatcctgttctttgaaggacatgctgagagggaatagtcggtgtgaggggccgtttagcctaatggtgaaatgcttagtcaactggaacctgactgcctggctccaaatgctggctttgccacatgtggcctgtggaaggtacgtagacatttgtgcctccgctgcctcatttataagttaatgacaggaagactacctacttctcagaggcatgatcagggataaataagtcaatgcccattaaaaaaaaaaataacagtacaggtgtacatgcccttacccaaaacccctggggccagatgtgtttcagaatttccatttcttcacatttcagaaaggtaacatgatgcatatacgatgttacataacaccccttagtaagctctgtaatcggctgtgttcatatttctgcagcaaaatgtatgaacactcgcaataagtgagattcaataaagaccagaaagggccttgtttcatttcaaatcaggttttgccaccaaaagagttaaaagaagctttctgcccttagagcattttggatgttggaatggcagataagggactatgaacaaatcagaaactaatatttagagcttatcatacacctcaggcatataatatttaatctgtacaatatctctgtgaactaggtattgttatccccattttactaatgggcatatcattatccctgttttacacatgagaaaattgaggtacaaagaggttaaagaatatcagccaagcgtggtgcctcatgcctgtaatcctagcactttaggaggccagggagagaggattgcttgagcccaggagttcaagaacagcctgggcaacatagtgagaccccatttcttaaaaaaagaaaaagaatatgcccagggtcacacagctaataagtggcagaaccaggattcaaacactggcaatctggccctagtgcctgggcagttgtccagcaggccatattgcctctctgcttagaagagtgcctgatgtgtattaagctctcaatagatgttaattattgctgtcatcaagaaagagaatattcagggccgagcacggtatctcacacctgtaatcctagcactttgggaagccaaggtgggaggtgggtggatcacttgaggtcaggagttcaagaccagtctggccaacatggtgaaaccatgtctctactaaaaatacaaaaattagccgggcgtggtcgtgggtacctgtaatcccagctatgcgggaggctgaggcatgagaatcgcttgaacctgggaggcagaggttgcagtgagtcaagattgtgccactatactgcgctccagcctgggcaacagagagagactccatctcaaaaaaaaagaaaaaaaaaaaaagaacgagaacattcagggacagtaacaggacagagagatcaggcattcattcagttttaggacggcttcataaaggaaaggacctttgggctgggacttgaaagataagaaagactgctaggcgaaagaaggaagccccacgtggagtgagcagcctttgcaagggtctggcaaaaaaaaaacctcctgaaaaacttgacattgatatggtagaagatacagataatattcaaatgaggaggatggaactagttttctattcttgctgtaacaaataatcacaaatttagctgcttaaaacaacacatttgttatcttacagttctgtaggtcagaagtcccacactggtctcagctgaaatcaaggtattggcagggttgcgttccttctggaggctctaggggaaaatccatttcctgctcattcaagttgttggcagaatccaattccttgagattgtaggactgaagtccctgtttccttactgtctgtcagctgacagccattcccagctttaagaggctgcccacagtccttgattctgagcctccttcctccatcttcaaagccaacaatggcaggttgagtccctctcacattttgaatctcccctgcctcttctgtcatcacatctctgagctacctttctttctccatcatctgcttttcagagctcatatgattagattgaatttcatcaaataatccagaaataatctccctgtcttagggtttgtaaccttaatttcatctgcaaagttcctttctgctatgtagtgtaaataacatacaggttccgaggattaggatgcggagcagggttggcatcatttggcctaccacagtctgccctctgacccccacagattcacatttgtttcacattcaaaatacattcacaccatcctaagatacccatgagttgtatcccatcacagggagcatcccaagcaagactggggagctagaagttagtctgggaaggtttagggaatgatggtagggtttgaagacagagatggagaaaagatgacaaaaaaaggaatcctcctcccgctgacctctgcccctcctatgtccacagcctctcaactcagctgtttgctctccagg

SEQ ID NO: 12 - DNA, 3120 bp, Homo Sapiens
aactttaagtttaggccgggcacagtggctcacgcatgtaatcccagtacttggagggaccgaggtgggcggatcacaaggtcaggagattgagaccatcctggccagcatggtgaaaccccgtctctactaaaaatacaaaacttagctgggcatgatggcacgtgcctgtagtcccagctacttgggaggctgaggcaggagaatcgcttgaacccgggaggtggaggttgcagtgagcggagattgcaccactgcactcgcctggtgacagagcaagactctatctcaaaaaacaaacaaagaaaacttgaagtatagtatccttttaaattttaaatagataatagaaactggtttccccccatttaaaccagaatttaagtttaactttatatattcttgacagtttggattttgtccttcaacctcataaaattgggaatttaagcatcacctggttcgatttaaatgcaatgtagaatttgcattaaaatactacattaaagcctcagatttgtagtagctaacagcacttctatgtatgtgtcagggactgctctaaatacttcatatatattaactcctctattctgtacttctgttcccgttttatacagcaggaaattgaaacactgagaggttaagtaactaaagttacagagctagagtgacaggagtaaagcttcaactcaggcaacccagacttccagagttctgatctccactactaagctgctagcatagcttttctggtaactatttttaattcaaatataattcgagtgatctatctaacaagtcatcactctgacaactcagtgacttgtaatgtaaaattattcattgtaattcatttaatattattgtttctctgtgctgcaaaaatcatagcaatcgagatgtaatttattactctccctcccacctccggcatcttgtgctaatccttctgccctgcggacctcccccgactctttactatgcgtgtcaactgccatcaacttccttgcttgctggggactggggccgcgagggcatacccccgaggggtacggggctagggctaggcaggctgtgcggttgggcggggccctgtgccccactgcggagtgcgggtcgggaagcggagagagaagcagctgtgtaatccgctggatgcggaccagggcgctccccattcccgtcgggagcccgccgattggctgggtgtgggcgcacgtgaccgacatgtggctgtattggtgcagcccgccagggtgtcactggagacagaatggaggtgctgccggactcggaaatggggtaggtgctggagccaccatggccaggcttgctgcggggggaggggggaaggtggttttccctcgcactgtcttaaaccgatggcctttccttggcacagggtccactgcagcatgccaaacgaggaggcaggggcgtcgtccccccgccccccactgcagcactggagatggatttcctgtacttcggatccagggtttttgacagaagaggaagaagggggaggggtagaagtgttaaggggagtctgctgagaaaagctgtttttgaagccagaaggggtttttgtttttataatgccatttgacagagtggaataacagtatctaaggaaacgggtagaggacaacaaagaatggagcatattcatggcgaggagcaaaagctctaccccattgaaaggcttcttttcctccctggcgacaaggacacatgcattggtggccaaaagagagaggagacaaaaccgctgcagatggctgatgtgaatctagtggaaagagctactggggatgagagaaagaggaggaggcaggtactgcagagcgtgagtggtggtgttggttggtgaaatactggtcaccagtagtgtgcctgcttttgtaaaacatctaagtaaactccctgtgaacagggtggcaaacagataccagtgtctttgttagttacaaaatgcagtggtagtggctttttgcggacgactgcagcagtgctttttctccctctgttaggccgaaaagacaactgcagaggaataagaaaccttgcagcaaatgctggggtagaagcccatttacaagaagccatagtttataaatgcagcctgaacagcagaaaaaaaattactgttttttaaagtaggaataatgtcaggctatgaatgttttgtcattggaatgtattggacactttgattctacatcacgaaagtgatgctcaaattctttgatttaacataaatcctatacgaaatcttaataaattatgtatgaaacagtggatcttttcttttgttagtgaagcttttatgccattaattaggtcattcaagagcaaaccactttacaacgtaaattactttgtcaaaaattatggtgaacaaatttttgtaggcctaatatttaagacctatagttaagtaattttatatttctctttggttgcttttagataacactgaataaatatttaagatattaattcagtgtgcaaatattttaaattaaagcaacatggcttttcttctagatgtatttctgtttagtgagtactcatgagatatactcttgatataaagtgtttttcattgagcttttttttcctttacctaaatgtaaaagcctatctttatgcatacttatagtagccagcctgccacacctccccactccctgaacaaggatggcagtggctttgtaaagccctccagggtcagtgacagtgtctcttaaataatgtttatgtaatagaaagtcttaagatgacctattatattgtttcagtaatattttcaagataatgcggaattgggctggcttagataaataagactacataagtttttcactgataaatttaaatagttctttaaaaaattatttctgctttaagaattacttgatcatggatatcagggttaatagtacttaggagccgggcgtggtggcccatgcctgtaatacaagctaaacaggaggctgagggaagctgaggcaggaggatcacttgagccttggcgttcaagaccagcctgggcaaccaagcaagaccctatctcaaaaaaaagtacttagagtctcttttttaaaatctgat

SEQ ID NO: 13 - DNA, 2501 bp, Homo Sapiens
tcacacggccagaaagggtccaggcggttcccggcgcttttccagcccttgttttcatggcgcaccctcccgccagccgcccccctccgcactccgtcgtccgcccggcccggccgcgtgcggttccccgggagcccccaccccgtcgcggaccccagcgaccaccaagtccgcacgcggcctgccgcaggcctgagcagaaggccccgcgcacacccaccgcgccgcggccgcgcgggaggcctgtgccgcccgcgccacccactggccgggccccgcgggcgcagcggagcgggcgggtggccggcccggacgcgccctccccggccgcggccccgcgcgccatgtgcccccggcgggacgcgccactcccgggcctgccgcggcgcctttaacccgggccagggagcggggcggagggggcggtcgggtggctcagaggagggctctttctttcttctttttttgaatgaaccgtgtgacgttacgcacaggaaaccggtcgggctgtgcagagaatgaagtaagaggacaggcaccacagccccgctcccgcccccttcctcccgcgcccgcccctccgcgccgcctgcccgcccgcccgccgcgctcccgcccgccgctctccgtggccccgccgcgctgccgccgccgccgctgccagcagaaggtgccggggctccgggccctccctgccggcggccgtcagcgctcggagcgggctgcgcggcgggagctccgggaggcggccgtagccagcgccgccgcgcaggaccaggaggaggagaaagggtgcgcagcccggaggcggggtgcgccggtggggtgcagcggaagagggggtccaggggggagaacttcgtagcagtcatcctttttaggaaaagagggaaaaaataaaaccctcccccaccacctccttctccccacccctcgccgcaccacacacagcgcgggcttctagcgctcggcaccggcgggccaggcgcgtcctgccttcatttatccagcagcttttcggaaaatgcatttgctgttcggagtttaatcagaagaggattcctgcctccgtccccggctccttcatcgtcccctctcccctgtctctctcctggggaggcgtgaagcggtcccgtggatagagattcatgcctgtgcccgcgcgtgtgtgcgcgcgtgtaaattgccgagaaggggaaaacatcacaggacttctgcgaataccggactgaaaattgtaattcatctgccgccgccgctgccttttttttttctcgagctcttgagatctccggttgggattcctgcggattgacatttctgtgaagcagaagtctgggaatcgatctggaaatcctcctaatttttactccctctccccgcgactcctgattcattgggaagtttcaaatcagctataactggagagtgctgaagattgatgggatcgttgccttatgcatttgttttggttttacaaaaaggaaacttgacagaggatcatgctgtacttaaaaaatacaagtaagttctctgcacaggaaattggtttaatgtaactttcaatggaaacctttgagattttttacttaaagtgcattcgagtaaatttaatttccaggcagcttaatacattctttttagccgtgttacttgtagtgtgtatgccctgctttcactcagtgtgtacagggaaacgcacctgattttttacttattagtttgttttttctttaacctttcagcatcacagaggaagtagactgatattaacaatacttactaataataacgtgcctcatgaaataaagatccgaaaggaattggaataaaaatttcctgcatctcatgccaagggggaaacaccagaatcaagtgttccgcgtgattgaagacaccccctcgtccaagaatgcaaagcacatccaataaaatagctggattataactcctcttctttctctgggggccgtggggtgggagctggggcgagaggtgccgttggcccccgttgcttttcctctgggaaggatggcgcacgctgggagaacagggtacgataaccgggagatagtgatgaagtacatccattataagctgtcgcagaggggctacgagtgggatgcgggagatgtgggcgccgcgcccccgggggccgcccccgcaccgggcatcttctcctcccagcccgggcacacgccccatccagccgcatcccgggacccggtcgccaggacctcgccgctgcagaccccggctgcccccggcgccgccgcggggcctgcgctcagcccggtgccacctgtggtccacctgaccctccgccaggccggcgacgacttctcccgccgctaccgccgcgacttcgccgagatgtccagccagctgcacctgacgcccttcaccgcgcggggacgctttgccacggtggtggaggagctcttcagggacggggtgaactgggggaggattgtggccttctttgagttcggtggggtcat

SEQ ID NO: 14 - DNA, 6104 bp, Homo Sapiens
tagccctgaagcaggcagacatgcccatatcttcctctgagtcagtgcctggatccaggggaccagacctcttacctgacatggcagagagataagctatgtttcaggtcctcaaaaggagcctggaaaatataattaattcaagccaaatactcttactattcccttgcatatacaacaaagataaaaatatctatcttattaaactgttgagagtaagaaagataatatacacacagtgcctggcacacggatggaacttagttgatggtagttataatatttataatatcttttctttgtttcaatttaatatgatttatatgacttttcatacttactgcacatgcaacatcttttagataattctatatctaggttattagtaaaacattgatatcctcttcagtatttatacagatgcccctcttctaaagtcttcagcaaaattcccactggggaatttcagctgtctctcactctttttttttttcacttttatttccatattaaaggtttttatttttaaggtatacaatatgatattttgatacatgtatactttgtgaaatgattgcaacaatcaagttaattaacatatcattacctcacatagtttcctgtgtgtgtgtgtgtgtgtgtgcgcttagagctcttgagatctactctctttgcaaatttcaagcatatgttaactatagtcaccaggctgtatattaggtctccagaacttactcatcttataactgaaaggttgtatcctttaactagtatttctcttttacccccaaccgcagccccaaataatcaccattctaacctttgttactgagttcgacttgttttttgagattctacatataagtgagatcatgtattacgtgtctttctgtgcctcacttattttgtgtgtcataatattccccaggttcagccatgttggcacaaatgacaatatttccttcttctgaataatactgctgactaatattccattgtgtgtgtgtgataaacacacaccacattttctttaataattcattcatcaatggacacttaggctgtttctgtatcttggttattgtgaatctcgctgtctctttggcagccatttctgtactcccttccccagaagcagctttactgcagtctaaaagtgtcttaggaaaatgattcagaagcaactacttctcttggcatgttcttcagtaaacacgatgatggaaagctttgatttctgcccttctttaaacagtgcaatcgattttcagttgggattttttccagttaatttgatagctccacgtttctaccaggctgaagaaaatgtatgtgttgtgggctgttgtattactgttgctggtggtgctgttgctactgctgagattttgtggttgagtccatattataaaggaattgtagagcagtaataaatttaacttgagctctgaactcaagccttcaggtgtgacttttttaatcacgtggaaattcacgtaagaattttcaaccagacttcatgtttatttttatttcttaagcaaagggtacaggaatctggtctaaacgaatgggaacaaacattacagttagactttattggagtgttgtaaaaatgtttttttccaaaatcagattgtttcaaaactgaccctggtttccagatttttaagttaggaagtaagacagtaaaaatcaagggtcaaatagtcaagcgactatttttttaaaatcagcattttccttggcgacttccgttagaccatgctctgtttagtactgaaactcagagaagttccaggaatagcgggatgaaatctaagtgatccgctcacgggaagctctacccttccttcgctcgctcagtaaatccgggatgggctcagagaatgacttcgcattttgcaccagaagatctcagtctttagagagaaccctagacgaaatccttacttccctgcctcattcctgaaaacttctacctgggaaccgacttgctgtgacaaataaaatgggaggagtctggctgaatagtttgtggatttcggaaagcaaagcgaaatgccgctctaactaggtccgaattttctgcaagctaccttgtgaaactggtgaatttgccagaatgaattttcattcatttaactttggcggatcgtctactagggtgcctggcatggtgctaattgctggagaaaatgattttcaaacaaaaacgaaaaaaactttcggcccccagcaaggagccaggcaattcctacaaactcaaggagtgcttgagaggtgagttaatgaccgtccctcctgtcctaaagagacagacttttacagtcagtcttgaaactgctcggggctacactagcgccctctggacgcagactctggttagcgccccacggcaccagcctttgatttgtagctgccaaagatttgatagtggggagtacgtgtctattctgaaggctgaagacacacaccacagtcaggagtagaattccgacccctcaaagtgacatggccacaaaatctgcgtctactggctttcattttgcggtcaccgtggcacgggcgaaagctatgaactctctctttaggaaaacacacatcacagacacacacacttacaaacggtttcaggaggttcttatgttagaaacctctggtcttggaaaaaaatcatttccgctgaagtatgtggtagctgagcgcaaatacccttctgctacagccccagtggcagaggcccaagcactacgccccactcagtgcccgcactgcggccttcgcaactcttcaagcagctctgcaccgaaaacccaggccggagatccgagcctaaactgctgaaaagctccaaggctccggacagggtctcagcaggggttatcttccttcaggatccggggctcattgtgcccaagatccgccatccaagccctgctctgcgcgcacgttgcctgtttcacgctctgcgctgacacgcgccggtgtcctcccgggccagttccagtcccgggtcctgtggccgccctgccggcgaccctgcggagagcgagtcttagatacccagtccccagccccgagttgttattccctcgctgtagttaagaaggaggagatcaattaagggcatcttagaagttaggcgttcccgctgcctcctttgagcacggaggccaccaaccccctagggggaagagatgtagcgcgaggcaggggtgtcgtgctaagaaatttcgacgcttctggggactgaggacaaaggtgcggacacgaccccggggtacctggagttccgtgactcgcgccacggacggcacacctaggggctaatttctgctctgcctcaaagaacctcaagctagagtccttgcctccgcccacagccccgggatgccgctgctgcgctcaccgcacaggcagcgcccggaccggctgcagcagatcgcgcgctgcgcgttccaccgggagatggtggagacgctgaaaagcttctttcttgccactctggacgctgtgggcggcaagcgccttagtccctacctctgctgagctgaacgctcaggcacagtggaactgaaacccggttctgcgggatgtgagagctgttgaggtcacgcgtaattgggtgtgatggagggcgcctgttcgtgatgtgtgcaggtttgatgcaagcaggtcatcgtcgtgcgagtgtgtggatgcgaccgcccgagagactcggaggcaggcttgggacacgtttgagtgaacacctcaggatactcttctggccagtatctgttttttagtgtctgtgattcagagtgggcacatgttgggagacagtaatgggtttgggtgtgtgtaaatgagtgtgaccggaagcgagtgtgagcttgatctaggcagggaccacacagcactgtcacacctgcctgctctttagtagaggactgaagtgcgggggtgggggtacggggccggaatagaatgtctctgggacatcttggcaaacagcagccggaagcaaaggggcagctgtgcaaacggctcaggcaggtgatggatggcagggtaggaagggggaggtccagaggtctggatggaggcttccgcatctgtaccttgcaactcacccctcaggcccagcaggtcatcggccccctcctcacacatgtaatggatctgaagagtaccccgggacagtccggggagatggagattcggaaagtatccatggagatcttacagaatcccctgtgcggaccaggaaactcttgtagatccctgcctatctgaggcccaggcgctgggctgtttctcacaatattccttcaagatgagattgtggtccccatttcaaagatgagtacactgagcctctgtgaagttacttgcccatgatcacacaaccaggaattgggccaactgtaattgaactcctgtctaacaaagttcttgctcccagctccgtctcttgtttcccacgagccctggccctctgtgggtaataccagctactggagtcagatttcttgggcccagaacccacccttaggggcattaacctttaaaatctcacttgggcaggggtctgggatcagagttggaagagtccctacaatcctggaccctttccgccaaatcgtgaaaccaggggtggagtggggcgagggttcaaaaccaggccggactgagaggtgaaattcaccatgacgtcaaactgccctcaaattcccgctcactttaagggcgttacttgttggtgcccccaccatcccccaccatttccatcaatgacctcaatgcaaatacaagtgggacggtcctgctggatcctccaggttctggaagcatgagggtgacgcaacccaggggcaaaggacccctccgcccattggttgctgtgcactggcggaactttcccgacccacagcggcgggaataagagcagtcgctggcgctgggaggcatcagagacactgcccagcccaagtgtcgccgccgcttccacagggctctgctggacgccgccgccgccgctgccaccgcctctgatccaagccacctcccgccaggtgagccccgagatcctggctcaggtatatgtctctccctccctctccctccattcgtcattttctcactccctttcctcctctccctctctctccgttagtctcttcatcagatagtctctgttagtccgcgatttataccaggctcgtgccctaggttggatcggacagtctcaatcccccggctcgctcttcctgctcggctgcggactccagtcttactctctcgcactgcacacaggcttaggccagtctcgggacactcaggctccccagggaccgcgcacagagcctgaggcaagagaaactttccgcagacggtgcgatcagggacggcgtctggagcccagcagtcccagggaaattggttcagaacctggaacagagcggatgggtggcaaataggcacgacgactgagggacaagcagccctaaactgcaagccccagtcacaggctctgggagcaaagagagaaagtcttgggtcccaatttaagagtaaaacttggttcctgcaggggactgaggtgccagcaggcggagcttaggctgagcactaaaattgattcttttatttctcagattccaattgcagagataatctctgtggatagatcccacccctcccaccaaggtgtatgcaaaagccccagaagaggaggacagctctgggtttccttatgggatcagcttctgtgacaggggcctgggagcatgtcctccacagagacctggctaacaggtttatatgtatctgtgtggctttggggagaagggtaggactgagacctcccccactcagctctccctctaggatcgctcctccagctctatcagactgtgcatgctacaggcccactgaacctcccagaagtccactgtgctgatgaggaaacaaaaaagaagagaaatataatgaccagtctgaagccacaaagccagagcgttagaagcaagacagaaaaccaggataggagccaaggtctgtgggctcctagaacttcgaactggcgcaggtggtttatctcattcttcccttgcaga

SEQ ID NO: 15 - DNA, 5976 bp, Homo Sapiens
agaggggcacctcccaccccaatctgaaccctatgactgcaccccttgccaggagatgaaagggacaagactgcctgaaggattaatctttagcctccaggcaggccagtggccaaaacacccaggaagtgaaagtctgtcctctgccataaggaaacctggagtctgtgatcccatcatgcggggtctgttatctgccaggtgacagggtctcttatctatctgcggtgatctgaagggcaaggcctctggccaaacatttcttttccccagtgatgcctgaaattccactgttagcgctggatctcagcaagatctcagagaaagctcaactcctggagtttgggttttccccagttgagatgttaggaaagcaatgggccttatcacctgcacggacaggtttgtgtacagtctcaggggattcagggaccccaccagagcccatccacagacaccaggttaaaagccctggacagcatttacaactcctttgaaagaagaaaagtctttctctagagccctctttaaagtgcaaatggccctgggaggttcgaaatgatgagctggccggcatgaaagaattttctccagtagatgcaagagataacctgaggagctttagtggcgggggtgggggaaggagagcctgggggaggggaggctccaggcagctcacaatttttcctagaactggaaagggaatgtattgggccaagagggctaatcactcacctttgcagagtgtttacaagaaccttatgaattaagtgctatcaacattcccattttacagatgaggaaaccaagatggtggagataaaatgacttatgcttctcaactaatggcagagccagaagtgaatccaggctggagtgaagtggctccagtgctcaaatgatcctcctacctcagcctccagagtagctgggactacaggcatgcactgccatgtccagctaattcaaaataatatttgttggggagatggggtttcaccatgttgcccagactggtctcaaactcctgggctcaagtaatcttctcacctcccaactagcctcccaaagtgctgcgattacagttgtgagccaccaggcctgcttaggtatccctgtttgatacaagagaaaacagagggcaggcacagtggctcacacctgtaatcccagcactttgggaggctgaggtaggtggatcacttgaggtcaggagtttgagaccagcctggccaacatggcgaaatcccgtctctactaaaatacaaaaattagccagacatggtgacgtgtgtctgtaatcacagctactcaggaggctgaggcacaagaatctcttgaacctgggaggcagagagtgcagtgagccgagatcgcgccattgcactccagccggggcaacagagcaagaccttgtcactaaataaataaataggaaacagagaagcaattcagtgtgttgcgaaagtcacacagcacctgtcttccacaaggagcccctctgtgttcccgcctcaccctggacacctgatctactgtctttggagcttggagaaggacttgccgagaagtctgaagaatgcatcaggcctgacctgactttgctgcccctaattgttttctaaaatcctttttattgaattatcagagtgtaatggaagagtcgatgagagtcgctgcagagttacgaggccaaggcttgctgggtagaagaaagtaaagccctaaaggctcccagggcccagcgatggtataaaatatgtatttttacataactgagaggaaaaaaataagcagacagtacagccccatgggggaaacgcctctttctgtatttccattatcttgttcaaggcacgatcctagtgggaaaggaaataccggagccttctccctctgagcctcctggtgggttaagagcagagggagccaaaatacgacatccaaaagacctgattggaaactcattaaaattgaggggacaggttgttggggggggcggtgctgggctgcccagaaatcgtctgcatttgagaaattacttgatggactcagaggcacctttagctctgggtgaaatattccaaacatggctttccccaggaggaagcgaaataggggctgggccttttgaaagagtaacccctactccaaatatttattgagcagttgctatgatgagccaagaactctgcttagcgattgtttttgtattagctcatgccaattcacttatacaaaggagaacactgacttccccaaggtcacagggctagtgagtggctgactccacttaatgctgtgtagttctaaccatgcttgaaggataaagggaaaggaggtgcccttgtcggggtagacaagccacccagacgtggctggccacagggagtcagacagggaagttgtctaacctaacatttgcctgtctattctgtttttgtcttttgatggaggacggcgggtgctggagggccactggcccaggacctgagacctttggcccctatctattctatttttgatcctaaaattatttcactggggacagaattctctggagaaggtgatggtggccatggtgtggctgtggcattaaaagccccactctgggggtcagaagatcctgggttttggtctttggctttgacattgacctgcctatgtgacattgaacaagttatttgcaaatcataggtttgggtgaactctaaaggtctcttccaggtcaacatcaaaaaacagactgaaaactgcagctccagctggaagactgggaccacatgagatgaagctgattgttagaagaaaggccctggaatcagagaggttggttccagtcctgcgccacctctcattggcctcaatctctctaagcttcagttgcccatctatcatatgggaataataatacagctcttgggttgttttgaaatgagcttaaatgagctggtcagtggctgggcacggtggctcatgcctgtaatcccagcactttgggaggctgaggcaggtggatcatctgaggacaggagttcaagaccagcctggccaacatgatgaaaccctgtctctactaaaaatacaaaaattagccagtcgtggtggcgcatgcctgtaatcccagctactcaggaggctgatagaggagaaccgcttgaacccaagaggcgaaggttgcagtgagccaagaacacaccattgcactccagcctgggcgacagagcaggactccgtctcaaaaaaaaaagagctggtcagtgtcaaatgcttagcacagagactggcacagtaatcttcaatgtccagcacctattgttactattttttttttttttttttttttgagacagagtcttgctctgtcgcccaggctggagtacagtggcgcgatctcggctcactgcaagctccacctcccaggttcatgccattctcctgcctcagcctcccgagtagctgggactacaggcgcccaccaccacgcctggctaattttttgtatttttagtagagacggggtttcactgcgttagccaggatggtctcaatctcctgacctcgtgatctgcccgcctcggcctcccaaagtgctgggattacaggcgtgagccaccatgcctggccctattgttactatttttacccctcacttctgtacagagcatttatggctcaagaaacatttgtcattttaattgtatgggagtcccacaacagcatagggagacatttctgatcattattcccattaggagggtggagaaactgaggctttgggaggtggtcctgacctagggaatcaatttgctgactcactaacccatgaagctctacagttaaaaaagactagattaaaaaatgagaactcagtaaaggggctgaggcaggaggatcgcctgagttcagaaatttgagatcagcctcggcaacatagtgagatcccctctctagaaaaattttttaaaaaattaggccgctcgaggcagagtgcagtggctcacgcctgtaatccaacacttcaggaggctgaagagggtggatcacctgaggtcaggagttccagaccagcctggccaacatggtgaaaccccgtctgtactaaaaatacaaaattagccggtgtggtggcacacgcctgtagtcccagctactcaataggctgagacaggagagtctcttgaacccggcaggcggaggttgcagtgagccgagatcgtgccactgcactccagcctgggcaagacagagcgagactccgtctcaaaaaatacaaacaaaacaaacaaacaaaaaattaggctgctagctcagtggctcatggctcacacctgaaatcctagcactttgggaggccaaggcaggaggatcgcttcagcccaggagttcgagaccaggctgggcaatacagggagacacagcgcccccactgcccctgtccgccccgacttgtctctctacaaaaaggcaaaagaaaaaaaaattagcctggcgtggtggtgtgcacctgtactcccagctactagagaggctggggccagaggaccgcttgagcccaggagttcgaggctgcagtgagctgtgatcgcaccactgcactccagcttgggtgaaagagtgagaccccatctccaaaacgaacaaacaaaaaatcccaaaaaacaaaagaactcagccaagtgtaaaagccctttctgatcccaggtcttagtgagccaccggcggggctgggattcgaacccagtggaatcagaaccgtgcaggtcccataacccacctagaccctagcaactccaggctagagggtcaccgcgtctatgcgaggccgggtgggcgggccgtcagctccgccctggggaggggtccgcgctgctgattggctgtggccggcaggtgaaccctcagccaatcagcggtacggggggcggtgcctccggggctcacctggctgcagccacgcaccccctctcagtggcgtcggaactgcaaagcacctgtgagcttgcggaagtcagttcagactccagcccgctccagcccggcccgacccgaccgcacccggcgcctgccctcgctcggcgtccccggccagccatgggcccttggagccgcagcctctcggcgctgctgctgctgctgcaggtaccccggatcccctgacttgcgagggacgcattcgggccgcaagctccgcgccccagccctgcgccccttcctctcccgtcgtcaccgcttcccttcttccaagaaagttcgggtcctgaggagcggagcggcctggaagcctcgcgcgctccggaccccccagtgatgggagtggggggtgggtggtgaggggcgagcgcggctttcctgccccctccagcgcagaccgaggcgggggcgtctggccgcggagtccgcggggtgggctcgcgcgggcggtgggggcgtgaagcggggtgtagggggtggggtgtggagaaggggtgccctggtgcaagtcgagggggagccaggagtcgtggggacgatcttcgagggaaggagaggggcatccgtagaaataaaggcacctgccatgccaagaaaggtcgtaaataggagtgagggtcccggggataagaaagtgaggtcggaggaggtgggagcgcccctcgctctgaggagtggtgcattcccggtctaaggaaagtggggtactggagaataaagacatctccaataaaatgagaaaggagactgaaagggaacggtgggctaggtcttgagggggtgactcggcggccccctcccgggagttcctgggggctcggcggccgtaggtttcggggtgggggagggtgacgtcgctgcccgcccgtcccggggctgcgggctggggtcctcccccaatcccgacgccgggagcgagggaggggcggcgctgttggtttcggtgagcaggagggaaccctccgagtcacccggttccatctacctttcccccaccccagg

SEQ ID NO: 16 - DNA, 2501 bp, Homo Sapiens
cagaagtcctcccttagagtgtgtctgggtacacattcaagtgcatggttgcaaacttttttttttaaagcactgaatagtactagacacttagtaggtacttaagaaatattgaatgtcgtggtggtggtgagctagaagttataaaaaaaattctttcccaaaaacaacaacaaaaagaattatttcattgtgaagctcagtaccacaaaaatttaaataattcattacaagcctttattaaaaaaaattttctccccaaagtaaacagacagacaatgtctagtctatttgaaatgcctgaaagcagaggggcttcaaggcagtgggagaaggtgcctgtcctctgctggacatttgacaaccagccctttggatggtttggatgtataggagcgaaggtgcagacagcagtggggcttagagtggggtcctgaggctgtgccgtggcctttctggggtttagccacaatcctggcctgactccagggcgaggcaggccaagggggtctgctactgtgtcctcccacccctacctgggctcccatccccacagcagaggagaaagaagcctgtcctccccgaggtcagctgcgttagaggaagaagactgggcatgtctgggcagagatttccagactctgagcagcctgagatgtcagtaattgtagctgctccaagcctgggttctgttttttagtgggatttctgttcagatgaacaatccatcctctgcaattttttaaaagcaaaactgcaaatgtttcaggcacagaaaggaggcaaaggtgaagtccaggggaggtcaggggtgtgaggtagatgggagcggatagacacatcactcatttctgtgtctgtcagaagaaccagtagacacttccagaattgtcctttatttatgtcatctccataaaccatctgcaaatgagggttatttggcatttttgtcattttggagccacagaaataaaggatgacaagcagagagccccgggcaggaggcaaaagtcctgtgttccaactatagtcatttctttgctgcatgatctgagttaggtcaccagacttctctgagccccagtttccccagcagtgtatacgggctatgtggggagtattcaggagacagacaactcactcgtcaaatcctccccttcctggccaacaaagctgctgcaaccacagggatttcttctgttcaggtgagtgtagggtgtagggagattggttcaatgtccaattcttctgtttccctggagatcaggttgcccttttttggtagtctctccaattccctccttcccggaagcatgtgacaatcaacaactttgtatacttaagttcagtggacctcaatttcctcatctgtgaaataaacgggactgaaaaatcattctggcctcaagatgctttgttggggtgtctaggtgctccaggtgcttctgggagaggtgacctagtgagggatcagtgggaatagaggtgatattgtggggcttttctggaaattgcagagaggtgcatcgtttttataatttatgaatttttatgtattaatgtcatcctcctgatcttttcagctgcattgggtaaatccttgcctgccagagtgggtcagcggtgagccagaaagggggctcattctaacagtgctgtgtcctcctggagagtgccaactcattctccaagtaaaaaaagccagatttgtggctcacttcgtggggaaatgtgtccagcgcaccaacgcaggcgagggactgggggaggagggaagtgccctcctgcagcacgcgaggttccgggaccggctggcctgctggaactcggccaggctcagctggctcggcgctgggcagccaggagcctgggccccggggagggcggtcccgggcggcgcggtgggccgagcgcgggtcccgcctccttgaggcgggcccgggcggggcggttgtatatcagggccgcgctgagctgcgccagctgaggtgtgagcagctgccgaagtcagttccttgtggagccggagctgggcgcggattcgccgaggcaccgaggcactcagaggaggtgagagagcggcggcagacaacaggggaccccgggccggcggcccagagccgagccaagcgtgcccgcgtgtgtccctgcgtgtccgcgaggatgcgtgttcgcgggtgtgtgctgcgttcacaggtgtttctgcggcaggtgaatgacgggcgtgggtcggtgcgcgctcggcttgcgcacacggtgtctctaagtgcgcgggtgacgagagtcgggatgtgccggagaccccggggcggagagcgggattacaagtacaggaatccctggtcacgctccccgcccctggaaacccagctggggcgagggagggcgtggacgggaccgttctgggagctcgcctttggctgcggttggctccaggccccaggcgcagtttgctcgcggcgtggggatgaagtccgtgtccctggaggggcccaggaagg

SEQ ID NO: 17 - DNA, 3486 bp, Homo Sapiens
aactaaagaggatgagacctcttgcttgatcctaggtgaattcttttctgtcagttaggtaggaagtcctgacttgaaaactagttctgggcactgccccctttactgttctctgggtatcaacccctgtccttcaattttagttgaactagtggatggtgataccacaggctcaagacagctgcatttaaatatcagtgaccacaggccacatcaaggaaacatctgcaggcaacccagggcctgggaaggagccattttcagtcacttgtaagacagcaggacctgcagactacagcacaatcaaactcagacaaaaccctgaaccagtgagaaccattaggaaggaaaggaacagaaaatgaaccaacctgagtgttaggagacttgcatctagtcctgactccggtaccaaccgaatgcatgtccctggacaggaaacctctctgagtctcgatttcctccgtggtaaaaaggagagggttaaaccacagggtcccgagggtcccttccagctgtcacattctggagcgtatgagatgaggtaggcacacaaagtggacaagatgtggctaagaaaacaagctacacatcaagctcatctgtagcataggtgcttaagaaaactttgctgctgtgtaatattagaacggaaggttggtttccagtaaaatgcattaactttggctcaaaccaagatgatgggtaccgggcatgggggtggggaggcagttgaagatccactgagctttgtctcagggcagccctgctcatcgtcctactttaccttccaccacggtgctcaagcccacactgagagagaaatttccagctgcaaaagggagaagagaaacgctggaatactagtatcggacgttaggacatggttgtggtgttttaaaaatcatttcatcatctggagtttgaccccgaggggagtattttcacccttcagccctctgaaagcattcactagcatctgaatattgttctgagtttgttggagcagtgaaatctggtgagagagaagggtggaggaaggaaggagctgttgtatttggcggctggactcaggtagaggaaactgctacaatcccgggaaagaacagaaaagtagaaagggacgagttcccacacgcagccaatgtccatggccttaactgtgcttgggaaggaagatcctgggccaggggtgtaccctcgtttttcaaaactaaacgtgtctgagacagctacaaagtttattaagggacttgagagactagagttttttgttttttttttttaatcttgagttcctttcttattttcattgagggagagcttgagttcatgataagtgccgcgtctactcctggctaatttctaaaagaaagacgttcgctttggcttcttccctaggcccccagcctccccagggatggcagaaacttctgggttaaggctgagcgaaccattgcccactgcctccaccagcccccagcaaaggcacgccggcgggggggcgcccagcccccccagcaaacgctccgcggcctcccccgcagaccacgaggtgggggccgctggggagggccgagctgggggcagctcgccaccccggctcctagcgagctgccggcgaccttcgcggtcctctggtccaggtcccggcttcccgggcgaggagcgggagggaggtcggggcttaggcgccgcggcgaacccgccaacgcagcgccgggccccgaacctcaggccccgccccaggttcccggccgtttggctagtttgtttgtcttaattttaatttctccgaggccagccagagcaggtttgttggcagcagtacccctccagcagtcacgcgaccagccaatctcccggcggcgctcggggaggcggcgcgctcgggaacgaggggaggtggcggaaccgcgccggggccaccttaaggccgcgctcgccagcctcggcggggcggctcccgccgccgcaaccaatggatctcctcctctgtttaaatagactcgccgtgtcaatcattttcttcttcgtcagcctcccttccaccgccatattgggccactaaaaaaagggggctcgtcttttcggggtgtttttctccccctcccctgtccccgcttgctcacggctctgcgactccgacgccggcaaggtttggagagcggctgggttcgcgggacccgcgggcttgcacccgcccagactcggacgggctttgccaccctctccgcttgcctggtcccctctcctctccgccctcccgctcgccagtccatttgatcagcggagactcggcggccgggccggggcttccccgcagcccctgcgcgctcctagagctcgggccgtggctcgtcggggtctgtgtcttttggctccgagggcagtcgctgggcttccgagaggggttcgggctgcgtaggggcgctttgttttgttcggttttgtttttttgagagtgcgagagaggcggtcgtgcagacccgggagaaagatgtcaaacgtgcgagtgtctaacgggagccctagcctggagcggatggacgccaggcaggcggagcaccccaagccctcggcctgcaggaacctcttcggcccggtggaccacgaagagttaacccgggacttggagaagcactgcagagacatggaagaggcgagccagcgcaagtggaatttcgattttcagaatcacaaacccctagagggcaagtacgagtggcaagaggtggagaagggcagcttgcccgagttctactacagacccccgcggccccccaaaggtgcctgcaaggtgccggcgcaggagagccaggatgtcagcgggagccgcccggcggcgcctttaattggggctccggctaactctgaggacacgcatttggtggacccaaagactgatccgtcggacagccagacggggttagcggagcaatgcgcaggaataaggaagcgacctgcaaccgacggtaatgaccctttcccaaccatagaatgtgtttggggccccgctttgcctgctggagggtgttaaccttagcttgcttttcggcgtattctgatttagctttgggagagctaactttattggtcttaggtgttcagtgctacctggcccactgcttgtctgtttgtgacttttaagtcagaaactggagatggtaagatccgataatttccctaacttaatacatcgcggtccctctcactagcaactcctaggtatgtgacaaagttgggatgtttatcaacggtccgcctcctggctagggaaagagctctggggcggagaatgcactttctgttttttgaaaacaacctcattttgtgcccttaaaagccactggggatgacggatccaggattgtgggtggaggtagtgggtttttcatcccctgactatggggccaacttctgccagccattgttttttctaataaagattgtgtgttctttttaaaaatttcccctgcgcttaga

SEQ ID NO: 18 - DNA, 8666 bp, Homo Sapiens
ctgcagggctttctttagtttaaagaaagtaatcaggtgtccctactgtgtcatgatctccaccctcagctgggttctccagtctggttttaaagaacaaaacaaaaggcttctctgtctgagtcttactcaacccatcctctctactcataagaggtattccaaacctttacgattctcaaacttcctaaccgaccatcttattttcactctgcaaacaagctaacctcctcattcatagaaggaagtgcctcaacttcctccccgttctgaccttttctccctcccaaatctatgtatctcttgtgacaaaatctataaccaccgctgtactttgagttctatttcttcattatttttgagggacctcaagtcctcaaaaatatcctatcttgcctgtgtacttaacttttcttttattcttttctaactttcccttctcttcacttggcacttgcccttccaggtatatgtgtgctcaggtctcctccaccttccatctgcctcacttcatggcatagggccttgaactatcacaaccaagctatgaaagagtagtcaacgcagtgtccccacttccttgccatcccattatcctagtttttcttttggctctctgaggagtccttcacaggctggttttcaggaataagtctaaatgaattactttcagttttcctaaacttctatgcctttgcacatcctcttacctctgcctagaatatctttctccttcttttccatctttaaactctcacatcattcttcaagactgggatcagctctcagcatccggaagcctttgcctactagagacaaatgagaatgagtttggtcaccttttcattttcttgtatcattctgtgctttattttgctcttctaagagcattacatgcttcatttaatccctaaacaactgtttgaggcaagtacagttattatcctaatcatgcaaatgagaaaacagaggcccagacatgttgagtaactttgataaaagttaaagaaccaataagtggaacagttgaggtttgaaccctggcagtctgactgtagagatactatgtttgacctactcccctctgcccccaccccatgtctgcccttagtttctgagcttgttgaatgaatgaacaggtggtagtctttttttgttataagactgatcagaattaagacaggtttaaatttcacgtgtagaattttcaaaactgcaaaggcagtgcaaatctaaaaaaagaatggcattctcaggaaagaggaaaagtaagtgtgagaataataataacaataaccaacaaactttagtaaatttagtaaatgtagtaaatttttacattaaaagcttttggacatacattatcatattttatggccacatgaaatatattataatcccattttgcacataggaaatctgagactggcataaggagcacagagatccaggactttatattttcattcttctaggattttgcacctcaggtcgatatgtatgagtaaactgggagtataatgggctctttaacagaaaaactaggaaagttttcccactattattaattatttacataatatttttttaattttattattatttatactttaagttttagagtacatgtgcacaatgtgcaggtttgttacatatgtatacatgtgccatgttggtgtgctgcacccatcaactcatcatttagcattaggtatatctcctaatgctatccctcccccctcccccctacataagatttataatggataatggacttcaatttctagagcaaaatggccccacccaaggatgccataatccttccagagctctactgcaagatatgagatatacatatctaaaacttgttcttggtatttccaaagcagtcaacttttacacctgtttataatgcatccaaatgttgtttttatatggttgcatctcccatcttcttcaccaatagctatatatatttttcacaagagctgaaagagttcttgatgtaggaatccatggtagagtttcagagaaatccctgaattcactgaaagttttatctagaaatacatgtgcaagtgaacacatcttttttaaaaaaaatcattacctactttcttttttgagaagaaggtatttatttcaacagactcttgaaggagcctactcttcccactctcccacccccattaagaaccactgtaggccgggcacgatggctcatgcctgtaatcccagcactttgggaggctaaggtgggtggatcacctgaggtcaggagttcgagacaagcctagccaacatagtgaaaccccgtctctactaataatacaaaaattagctgggtatggcagcatgtgcctgtaatcccagctactcgggaggctgaggcaggagaattgctcgaacccgggaggcggaggttgcagtgaaccgagagagatcgtgcggtgccatttcactccagcctgggcaacagagcgaaactccatctcaaaaaaacacacaaaacaaacaaacaaaaagaaagaaccattgtattagtgatggaaatgtgttccctccctcccatcctggcaaccactttcttcctcctccatcataaaatatcttaaactaaactaaaataattttatttatcgatagtttgaattttccctatcattgctacacagctaattgagaggtaccccgaggaaaatataaatggtacagtaatgcattgtagattttaataacatacttgacatcccaaattgttttcattggcttcattttaaaaactacatgttttaaaatcaagcagacactaaaagtacaagatatactgggtctacaaggtttaagtcaaccagggattgaaatataacttttaaacagagctggattatccagtaggcagattaagcatgtgcttaaggcatcagcaaagtctgagcaatccattttttaaaacgtagtacatgtttttgataagcttaaaaagtagtagtcacaggaaaaattagaacttttacctccttgcgcttgttatactctttagtgctgtttaacttttctttgtaagtgagggtggtggagggtgcccataatcttttcagggagtaagttcttcttggtctttctttctttctttctttctttttttcttgagaccaagtttcgctcttgtctcccaggctggagtgcaatggcgcgatctcggctcactgcaacctccgccttctcctgggttcaagcgattctcctacatcagcctccgagtagctgggattacaggcatgcgccaccaagccccgctaattttgtattttttagtagagacagggtttcgccatgttggtcaggcttgtctcgaactcctggcctcaggtgatccgcctgtctcggcctcccagaatgctgggattatagacgtgagccaccgcatccggactttccttttatgtaatagtgataattctatccaaagcatttttttttttttttgagtcggagtctcattctgtcacccaggctggagggtggtggcgcgatctcggcttactgcaacctctgcctcccgggttcaagcgattctcctgcctcagcctcctgagtagctggaattacacacgtgcgccaccatggccagctaatttttgtatttttagtagagacggggtgtcaccattttggccaagctggcctcgaactcctgacctcaggtgatctgcccgcctcggcttcccaaagtgctgggattacaggtgtgagccaccgcgtcctgctccaaagcattttctttctatgcctcaaaacaagattgcaagccagtcctcaaagcggataattcaagagctaacaggtattagcttaggatgtgtggcactgttcttaaggcttatatgtattaatacatcatttaaactcacaacaacccctataaagcagggggcactcatattcccttccccctttataattacgaaaaatgcaaggtattttcagtaggaaagagaaatgtgagaagtgtgaaggagacaggacagtatttgaagctggtctttggatcactgtgcaactctgcttctagaacactgagcactttttctggtctaggaattatgactttgagaatggagtccgtccttccaatgactccctccccattttcctatctgcctacaggcagaattctcccccgtccgtattaaataaacctcatcttttcagagtctgctcttataccaggcaatgtacacgtctgagaaacccttgccccagacagccgttttacacgcaggaggggaaggggaggggaaggagagagcagtccgactctccaaaaggaatcctttgaactagggtttctgacttagtgaaccccgcgctcctgaaaatcaagggttgagggggtagggggacactttctagtcgtacaggtgatttcgattctcggtggggctctcacaactaggaaagaatagttttgctttttcttatgattaaaagaagaagccatactttccctatgacaccaaacaccccgattcaatttggcagttaggaaggttgtatcgcggaggaaggaaacggggcgggggcggatttctttttaacagagtgaacgcactcaaacacgcctttgctggcaggcgggggagcgcggctgggagcagggaggccggagggcggtgtggggggcaggtggggaggagcccagtcctccttccttgccaacgctggctctggcgagggctgcttccggctggtgcccccgggggagacccaacctggggcgacttcaggggtgccacattcgctaagtgctcggagttaatagcacctcctccgagcactcgctcacggcgtccccttgcctggaaagataccgcggtccctccagaggatttgagggacagggtcggagggggctcttccgccagcaccggaggaagaaagaggaggggctggctggtcaccagagggtggggcggaccgcgtgcgctcggcggctgcggagagggggagagcaggcagcgggcggcggggagcagcatggagccggcggcggggagcagcatggagccttcggctgactggctggccacggccgcggcccggggtcgggtagaggaggtgcgggcgctgctggaggcgggggcgctgcccaacgcaccgaatagttacggtcggaggccgatccaggtgggtagagggtctgcagcgggagcaggggatggcgggcgactctggaggacgaagtttgcaggggaattggaatcaggtagcgcttcgattctccggaaaaaggggaggcttcctggggagttttcagaaggggtttgtaatcacagacctcctcctggcgacgccctgggggcttgggaagccaaggaagaggaatgaggagccacgcgcgtacagatctctcgaatgctgagaagatctgaaggggggaacatatttgtattagatggaagtatgctctttatcagatacaaaatttacgaacgtttgggataaaaagggagtcttaaagaaatgtaagatgtgctgggactacttagcctccaattcacagatacctggatggagcttatctttcttactaggagggattatcagtggaaatctgtggtgtatgttggaataaatatcgaatataaattttgatcgaaattattcagaagcggccgggcgcggtgcctcacgccttgtaatcccttcactttgggagatcaaggcggggggaatcacctgaggtcgggagttcgagaccagcctggccaacaggtgaaacctcgcctctactaaaaatacaaaaagtagccgggggtggtggcaggcgcctgtaatcccagctactcgggaggttgaggcaggagaatcgcttgaacccgggaggctgaggttgtagtgaacagcgagatggagccacttcactccagcctgggtgacagagtgagactttgtcgaaagaaagaaagagagaaagagagagagaaaaattattcagaagcaactacatattgtgtttatttttaactgagtagggcaaataaatatatgtttgctgtaggaacttaggaaataatgagccacattcatgtgatcattccagaggtaatatgtagttaccattttgggaatatctgctaacatttttgctcttttactatctttagcttacttgatatagtttatttgtgataagagttttcaattcctcatttttgaacagaggtgtttctcctctccctactcctgttttgtgagggagttaggggaggatttaaaagtaattaatacatgggtaacttagcatctctaaaattttgccaacagcttgaacccgggagtttggctttgtagtcctacaatatcttagaagagaccttatttgtttaaaaacaaaaaggaaaaagaaaagtggatagttttgacaatttttaatggagaagggagaagaacatgtagaaaaggggaaatgatgttggcttagaatcctaactacattggtgtttaatataggaacatttatttatataacattttaaagtactaaattcatattagtatattatcaaatggatatattatcaaatgggtttaagcatcctacacattttaattcaattgattcattttctttttgctttggatttctatcatgatttaaatatttacatatgggttactttttagatttttcatactatgaaatataagaaaaacctttaaggctagttttatgaccaagacgaaggacttcattgaatacacaaaacaataaatatactgcaacattttgtctttctttttgtagctgcaatttggtttgcttatactttctctttgtctctttgaaaactgagtcagtttcactttctcaggacaggatttaataaccataatataatttagtataattccttgatttaggcaaattatgcaatttgtgtttagtatgaaatgtacctaaaaataagtaactcctctttaacaccaccatcctcaaactaatataacaaataacagttatcctaaaataaattgtctacttccaccatgcagcactcaaattttaaggttgctatgactgcagacagtattttaaaattcctctctggaaatggctttgtttccaagatgatttaggaaccaaagaggtgaccatctcttgtttaatgaactctcaaatcataaacctgggaagtgttttagtttcctactgctgctgttacaaattatcacaaatgtgttagctaaaacaaacacaaaattattattttacagttctagagatcagaagtcaaaaatgggtccacaaggtttcattccttttggaaactctaaggggcaatctgtttccttgtcttttccagcttctagtgaccatcaaattccttggctcatggtctctgtattttctctgtggcctgtgcttccattcttgtatcttctctctgactgtgaccctctaataaaaacacttggggttatgttgggcccaccctgaaaattctggataatctccctcaagaccattaattaaatcacatctgcaaagcctcttttgccacataagttaatgtattaaaagtttttgaggattaggacatagacattgggggtgggggggcattattcagcctaccacaggaaggaattttagggttaattaaactagccttcttattttatacttgaagaaattgaagttttggaattggagagcattatgctaaatgaaataagccaaacacagaaagacaaatatcacatgttctcacttatctgtgaaatataaaacaattacattcttagcagtaaagagtagaatggtggttactagagctggggggtgggaggaatggggagatggtaatcaagatataaagcctcagttaagatgggaggaataagtttgattgttttttttgagatgtgtttcatagcatgatgaatatagctaaatagtaaatcccaaatgctctcatttgacaaaaatgtcaaatatttgagatgatggataggttacttagcttgacttaataattccccattgtgttcaaagatcataacttcatattgtaccacataaatatatacaactgtactatcccaatatataattttaaaactaatataatgaaaaagaaattgaagttcaacattcccagaagctaagtgtaacttaaaagttttgtgagaatttgttttaacaaacaaacaagttttctctttttaacaattaccacattctgcgcttggatatacagcagtgaacaaaaaaaaaaaaaaaaaaaaaaatctccaggcctaacataatttcaggaagaaatttcagtagttgtatctcaggggaaatacaggaagttagcctggagtaaaagtcagtctgtccctgcccctttgctattttgcccgtgcctcacagtgctctctgcctgtgacgacagctccgcagaagttcggaggatataatggaattcattgtgtactgaagaatggatagagaactcaagaaggaaattggaaactggaagcaaatgtaggggtaattagacacctggggcttgtgtgggggtctgcttggcggtgagggggctctacacaagcttcctttccgtcatgccggcccccaccctggctctgaccattctgttctctctggcagg

SEQ ID NO: 19 - DNA, 2501 bp, Homo Sapiens
gaaaaccaggttgagcaggttggtttttcaaagaaattcattgagcttccataatgtcctttctatttgacgggagaaaaggggctttggaagatcaagtgtgaagctttagaattctgtctggagctggttaggaccacccaggcctgagtataagcaaagcgctgtccgtggtgctagtaagcgcgaatgcccccggcaacgttttccctacccaaagttgtttttcattcagtcaacttgcttcgcgaagctcacacatctgcctcgtgcaagattctcagtcattttacttagtcattggttctttccctatcaccattctttatgtccccctcaaagaaaaacattatcttccatttccttatcaactccaaacagctttcatttttctgacatatttactacctaagaaaatggctcaagaattgggtcagactatcttgtcctaacttttctgataagtttcagagaaactcaaaggtcaaaacaagagcataagagtaaaaggtagagaaattaagaaactgaagactaggaaatgggggttggatgggaaagaaaaagaaattgttattaatgctacccggttcccttccctgtccaggtggatttcagctctgttgaggctctgtcagtagattttcagccctaaccagcacttccatggtggtggcacttccactgcctttaaaagaaagagctttttttaattctacagggatttgggggatgaggagtcagagctaaggtatcctaaaaaaaacatgtgaagactctcattttgcaatacacaagcaattgccctcctgttaagactttgtcttcctcagcactccgaaccaaaatgattctgtaaacaaaaactgttcacttttaggagaggtccacttatgcagttcctcaccaaagtttttaggcaacaaatccataacttgcggttctcttcctatccaatgtagcatccgctgaaatgttttaaatattttaagtaataaatgttgattcaaactcacctaggaagattaggaaggggaaaaaaagcacttggcatttaaatcttcagaagagaatttaatgacaggttcagcctgtttaatgacaagcccagcaccacacccctctcttatgatgtttcattattactgcataaatttcctttattactcatgataaataaaaataagatacctgacaaagtgggtttaaataggtaagagtgcaaacaaagatttactgtacaaatatgatgaaactgggatctcagattcttaaagtataatttttttttgtcttatgtgtgccaggttgccactctcaatctcgaactagtttttttctcttttaagggttgtatccataatgcaaaaatggaaagaattaaaaagcacacgcaaaacatgattctcgggatttttctctatttttatggttgactaattcaaacagaaagacacatccaagagaaaattgctaagtttgatacaagttatgaaacttgtgaagcccaagtactgcctggggatgaatttaacttgtatgacaggtgcagagctgtcgctttcagacatcttaagaaacacggagttattttgaatgactttctctcggtcacaagggagccaccaacgtctccacagtgaaaccaactggctggctgaaggaacagaaatcctctgctccgcctactggggattaggagctgagggcagtggtgaacattcccaaaatattagccttggctttactggacatccagcgagcagtgcagccagcattcctggcggctccctggcccagtctctggcgcatgcgtcctagcatctttgggcaggcttccccgccctcgtgacgcgtcggcccgggcctggcctcccggcgatcacagcggacagggggcggagcctaagggggtggggagacgccggccccttggcccagctgaaaacggaattctttgccggctggctccccactctgccagagcgaggcggggcagtgaggactccgcgacgcgtccgcaccctgcggccagagcggctttgagctcggctgcgtccgcgctaggcgctttttcccagaagcaatccaggcgcgcccgctggttcttgagcgccaggaaaagcccggagctaacgaccggccgctcggccactgcacggggccccaagccgcagaaggacgacgggagggtaatgaagctgagcccaggtctcctaggaaggagagagtgcgccggagcagcgtgggaaagaagggaagagtgtcgttaagtttacggccaacggtggattatccgggccgctgcgcgtctgggggctgcggaatgcgcgaggagaacaagggcatgcccagtgggggcggcagcgatgagggtctggccagcgccgcggcgcggggactagtggagaaggtgcgacagctcctggaagccggcgcggatcccaacggagtcaaccgtttcgggaggcgcgcgatccaggtagctggggccccagggc

SEQ ID NO: 20 - DNA, 2501 bp, Homo Sapiens
gtgttctagctcctgaatccatgctgttcgtcactacactgtactgcctgtggatgacttacttgtccctgtagtttcatctgaagaattcctcctccttttcctttgaggcctgcctcaaatatcacttcccctgtgaagactgcctggtgttctccaggagagagtgtgactcccttctctaggaatggtagcaccccaaacacacacattttgcagcatatttcaccttgcatggtaatggcctgcttgtgagttttattccgtaccagagggtgagggctctgaagatagcgccaggtcttatttacctcgataccccacaacactcattacatgtctgatgaatgaatgcatagggggatggctgggtgcatttctctcaacttttcaatttcttgaaataaataacaaaatcttaccttccctcagaagtcctggcatggttcctttcatcttgccacagccactgataatcactttcattttctgtgtaactcaccaggcaagaagtccatgcagatttacttttagtagttcacatgacaaataaatactgcgtttgatttccaaacattaaaccatagtatattatagatagatatagagttatcattcaaagtatgatatttcaatctcaaaaggcttcccctgaagaatattacaaactcttcctctctttaagatctgctgggtaggaaagatgggagaaaatgaattaatgtttacacagaaaggaggataatgggggcaaaaataatagatgaacgtatgggtggatgagagaatggataaaatgataggtggatatgttgatcttggacagatgggaaatgagtggatatatcaataaacagatatgtgggtggatgggtggagaagaggatggtggatggttgtggttttatgaagagatgtgaaaaaggaagtgtggaatgatggatgagaagttgtatgggaagatgaatagaagaataggtggttgaataaattaaaaggtgtgtggttggatgaatgaatgagtgggatgatagatggacctaagtggttagtggatggacaggaggatggatggatgtgagagccccagaaggacataaggaaagatgggtggatagatggatgggcggatggaaggatatttaggaggatgaatgagcatgtgtgtggagagaggtgcccattcacactggcttgaacacatgggttagctgagccaaatgccagccctatgacaggccatcagtagctttccctgagctgttctgccaagaagctaaaattcattcaagccatgtggacttgttattgaggggaaaaagaatgagctctccctctttccacttggaagattcaccaactccccacccctcactccccactgtgggcacggaggcactgcgccacccagggcaagacctcgccctctctccagctcctctcccaggatatccaacatcctgtgaaacccagagatcttgctccagccggattcagagaaatttagcgggaaaggagaggccaaaggctgaacccaatggtgcaaggttttacggttcggtcatcctctgtcctgacgccgcggggccagcgggagaagaaagccagtgcgtctctgggcgcaggggccagtggggctcggaggcacaggcaccccgcgacactccaggttccccgacccacgtccctggcagccccgattatttacagcctcagcagagcacggggcgggggcagaggggcccgcccgggagggctgctacttcttaaaacctctgcgggctgcttagtcacagccccccttgcttgggtgtgtccttcgctcgctccctccctccgtcttaggtcactgttttcaacctcgaataaaaactgcagccaacttccgaggcagcctcattgcccagcggaccccagcctctgccaggttcggtccgccatcctcgtcccgtcctccgccggcccctgccccgcgcccagggatcctccagctcctttcgcccgcgccctccgttcgctccggacaccatggacaagttttggtggcacgcagcctggggactctgcctcgtgccgctgagcctggcgcagatcggtgagtgcccgccgcagcctgggcagcaagatgggtgcggggtgctcagcgcggacccggcggcagcccctccggctgagtcggccctgggggactggagtcaagtgagctgtctgcgaagtgcattgggctccggaaagcagggctgggatttgcgctaaaccgttggagaatgtgtctgtggaagcaccatttggttgaaagaaaaagagaaagagaagaaagtttgttgggcaggctgccggcgcgcagttttgggcgaggtcgctagagctgcagcacatggcagaaagtaaccgttctcccggatgcgcacagtcgttgtctggactaacaggctcctgtgcccaagggctcgccaagccccaccgggctgtgtctaggcagggcagagctgggcggggca

SEQ ID NO: 21 - DNA, 16579 bp, Homo Sapiens
tgttttttaaaatgatgtctagctgaaccagccaatggagacaaaaatatttatatataattttcctctaagttcactagtcattttatagatcagttataactttggctactccaatgagttaatttctttctagagacattataaactccttaaagatggaaaataattgttacttttttgaataatgcctactatctaaaacaatgcacataaaagctgctcaataaacttttgttgaattgagagaaaatataaaaaattgaaagcagtctgtttgtaataagtgtttgctaagtcttacagatcttctcttttttttggaattattgcaacaaatatttgacctttgatttgtaggattaaaatgtgatttctcatattttaataggagcaagcattagtcctgcaattctttttgtcaatagaataaaaatggaatgtatgcttgctgcttctacatgccggttgatacccatgctgaacacttttcttacaacgcagaggtttccttgttttctgtcttgcgttctacctttgctcaccacagagacattaatgatgccatgtgtctttttgcaccatcagtgcagcagctttcattatgctccttgtctcggtcccactgtagtctaattaaataaatggaaacgggtagtcactgaaaataaacagcaactgcaaaagttttgcctcttaagaaaccttctgcattgtattccgccctgcctcattgattctaagatctctaccgcttccttgtgttcagaaaccagactcttcagtttgtcttgcttcagtcagacaaatgctttataaaaatgacctatatttttcagactgtggggagagaagaaaaagactttgagaaagtgactaaggagggagtaagagtgatacaatctttgattcaatttagttggactgtgttctttatgccttcatctttttctttataaaaaagatagcgtttttgatgctctgctccaggcagcctcccagggtgagtgcagatgtgctgagccatttggctgccttgaggaccggctcagagagcctctcttctcactaatgaagtcatctcctctcggcagcccggcctctcccatcactccatgttggaacttggctttggcttgcatagttctgtcgtgatgtagatggtctttcagttaagttctagagaaatctgctcaaccatgaacaggacatttacagcacaggagaaaaaaaaatttattaaaacaaatattttactgtaacattttgatttgggggttggagagcaaaaactcaatatctgatgtctgggaaaaatctaatgttttatggctttctaaggaaatttgtctgtgtttaatttatcagagcaatttatatacttcgggttaaagcacaatgagattgccaccatcactttgccttttgcaagatttcttttttaagaataaaaagaaggcaataaagaccttatatttctgcctttcctagaaagccaaagagaattcaaagtgctggatgaaatgtctgtccctaatttgcagtgttttatttaaaaaaaaaattatgacacaatcttagaggataggcttcctttttccagggtctttgaaagttaaaagtacatttttaatctgtagcattactgtatcatccagtgaggataatttgcttagttgtgcctaggaccagtcagatcaaggagttgaaactaagctctttctgaatttgaatgggactggaatcttgtcatccctagagcagcaatagatgatgccatgtctaagaacacttcacctgatcaataaaaaaggagaagtctgaaatgtaatcctaaagaacctcagaaggaggtttagatgaagataataaaattccctggagacacatctgccatctacacctttcctctccaagtcattggcttgctgcccctgagctcagccaaattcccaaagacaagatcaaagcaaggaagcaaggcacatagcttctggcttatggtttcttttagacacaagcattgtgaatgaagatcttgctttatttatacctgggatcttggagttttcacaaagaatatccccagtacaaggatgtgatttaaagggggactcacagaataatattttaattactgtttgattcatacttgagtgtaatggacaaataaatacaattttagttataaaacctgaaaaatatatattttcccattcaaaaacttctgatagttttgtcaggcattggagaatcagaaataaatgctctctcattttctttctcttgatgaaggaaagtcattaaaaacagttacatagaaataataatacaactgtagactctattctaaatatagctggtatgttttcctttttcttttttatccattctccattttagacagctagaggggaaagtctgccctagagatagaaagaagatatccatggggtataatttcattttagttatctgatagcctgaagaagtatttaattttctgaataataatgttacaagtcaaagaagagaaaagacaggcagtttaaagcttttcaacattgtgcatattctaattccttaagtcagccctgagaaagtgcctttgtcctgtagaagtatttggtcaagtgttgtgaagtctattggcattaaaagaaactaaaaattttggaggattagagaatcaaatttggcaacataaatgaaaacatctcagaatgtaaaaagtatctaacccatcactttcaatcatgttccattatatacagatggcattatttatagtgaatgttaactattaacatttccctaaaaatgggcattaatctgctattagttgcttgtttctgatctagttctcctttgttgaaaggttttacttaactgtatcataaagggacaaaagggtaaaagataataagcttttcagactggcagatctgtcacttacaaaatggccttgggcaggttacttgaactctttgaaactcaactagatttactcaaatttaagaatgagaatacaaatccacatcttgaagtgtttcacagaaaggtctatcttaatgtctggagtatatatttcaatgaacattcattttattttatttctctccattcctgaatcaagcaatcttgaatctaaagttgctatgattagcactgaaaagaccactggactattaattgtgtgactttgggacagtaactttctgcaccttagtttgtttacatgttatacatgaaggttgaagtctgattctgctctgtgactatcattctaaacatctgatgaaatcaaatttcagtgtttggaatggtagtacaataaatttactaagaataaataattcactgcaaaaacacattgatttccaaatgatgtaactgacagttatattactgcagagggctgataaataacaaaagaaatgaaagatgcacatggtgagaactgaaattatcctgacaagtcttctacctgtttatcacttaaaatcaatgaccatgctgaatgcctacaaattacaaaatataaaagaaatcttataaatgcgcatgtacaggagtctaagttactaaaagttttaaagcataagtttaaaccaaactaatcaaagaagttgagaggaaaaattggctttcatctttaatcactactgttttgaggtcctatgtttaatataattttctaagtagaggcttcagagagaagagttgtgaggatactttcatatttgtgtagaaggaaaagtttgccatccattctagtatccctagtgttatactgatgtgcaccttggatttattttgttcctattgtataaactcatacttgacttcaaagaaaaggaaaatccaaagtccctcttttctaaggggacagaaatcctttgtgtcaactgtttgacccttttctctgtaaggtcctattggaaatcttttgtaacacaatgcaggggactcttccatgtgttgatgctgtttacacagtggggtgggcctgactgaagaaaaaaaatcgcatatacgcatgaaagattatggtcttatttccggaaagcatgaaaggtgattgatacttccaagaagtccctgttactcaggaaaattatcaaatattctactcagagatacttggaaagactgaaggaaaggaagaacgaagaaagcagaatctagacttatgtggggagagatttgtggcagaggaaaagtattctctttgaatccgacaagggatttgcctgggggaatttcctgtccagccttttattaccagggtcttttgaagccgggctccccattgggcagttccctgggagtgcagtggggaattcttacactttccctctaggtccccgaaggatctcgttttctcagtgtctctttcaggttggcaggagccttgagcctgacacttccctttgatgggacaggcaagctctgtgggcgcgtaaacacgctgtaaccaagttctttgctgattttacagttttgtgtgctcccgagaagaagtgatcgtactcaattgtctattgctggcctgccccctaagagcctgggggctcctttcccctaacccagaactagctgcacggggggcggggaagtgggggtggggaaggagtgggagggcagtggtttccgcgagcagagcgatgttactgagtgagtccctgaatggggagcgctgctgtccccaagccgattggtacttcttgtcaggaagaaacgccaagaggtgggagtgcctggggagggaggcaggcggtccctaccgcaggcgcggggagctgcctttccgcccctccgcctgctttccaagcctggactcttaggagtggctgaagctgcggagcgcttttggagcctgtgaatgaaccctcctcctctccctcctccttcttctcgctgagtctcctcctcggctctgacggtacagtgatataatgatgatgggtgtcacaacccgcatttgaacttgcaggcgagctgccccgagcctttctggggaagaactccaggcgtgcggacgcaacagccgagaacattaggtgttgtggacaggagctgggaccaagatcttcggccagccccgcatcctcccgcatcttccagcaccgtcccgcaccctccgcatccttccccgggccaccacgcttcctatgtgacccgcctgggcaacgccgaacccagtcgcgcagcgctgcagtgaattttccccccaaactgcaataagccgccttccaaggtaatcacgtttcttttgttccccccttaaaaaacaaaaacaaaaaacttatagaaaaaaacccgcgagcttagaaaaaagaagcaattggtagaaggctttaattaaggcaaagagctgtaaggcgaagttaagaaaatgtaggcacttaaaaaatgcaggtaactttcataaaggcttttggggagaggcatacagagggaccttggtgttgaaaaagattcagacaaaagaaacccagggtggggtgggggtaaaatgactaacggaattgggggaagggagggaataaattgtaaagaaatcatagaaaagtggtgggttcttgagctggagagaagagagggacctttggcactttgatttttttgttgttgttgttcttaacacgctcgaggcaaaagtttgaatggggactaccaagacttgccacagacaagtccccgaagccgccttggtgcaggccacctggtttcccagcccctggtgtgtggtcagtgcctggtgttcctggaaagccactcccgggcagctcctgacagtgcgacccggcgcccaagcagcctgggaccttgcgcggacctgaccccttcagaccgcaggcagtctgggaggaggtccggccgggggaggtgcaggatccccgccgtgtctctttgacgacttggggactgtcacggttctctcccggcgcccctgggttcttttgtcctgcacgcggtgcgaaggggccagcagggaaggagcagaggatggggggtggggttgttggagccccgcggaggtctgggaggcccctgggcgggaaaagcctgttctgaatcggcagggatgtgcaacaatttttctcaccctgaagagtgaaatagggtctgtcgctcccatctcaacaagcaaaccggcacccagagcgcactgcagacaaaggtggctcggggacccgaatcaggggcctctgggtcagtcctctcgcccagactacaggagtcctccgtttccttacatattccccaccctctcctagttctccgctctagttgagcaactttactggcaggtctagcggcagcggcgcgcgcgtgtgccgggagccccgggggacgtcctcggctggagcgccccaccgtcctgcagaggcgtgggcgctgtagggcgacatccctggtgcgtgcagacctagggcatccgggttgttctggcccgcggtctgtgtcactgggcgtggagcggtctgggtgttaggcagaggagagcggggtagaaaaatagtgtcatagcctaaactatttgctctccaatccaactgcgtctcggcaagtcctgcatgtccctgggagatgctgcgggaagggggagaaatctacacggcgcctggagagttgtcctgccgcgcgcacacccgcggcagagtctctctgggtcgcgttcctcatctttgtgtctccctctgtctccatcttctctgcctcccttcccctctcccagcctctgttctctctctctagcttctgcgtcccctcccccacagctgacaaatgaatggctagtgtgaaatccctgcctttcccgtgctccaaggcagcagggagggaggagcgagggaggcggtgcgctccttcggatctgcccccagttcagctcacaagacttgcagaacctagatgtctaggaattgggagttttgcggcgggtgtgggcgccccctgatggagaagtcccgcacaggcggagaaaaacaagccccccagaccaagcgtgcatctttcacaaccttgtgttcaaggatggaaggccctagttttcccttaagtcattcattttgcactccacaatctgcggcgtacatctaggagtttggaggaccctgaaaaaaggtcttggtctgtgcaaagtgcagagatgccttctcgcgagtcggctggaacgcacgcggcgccctgggtccagttcgccgcttagtggacgaacgcacatggccggggtggagccaggtttcggaggtctagacgcgccaccctgggcgtctttaagaaagataatacacataccgtgctctcaaaacccatgaccacttgaacccaacggtagggccccgccccaggatattgcaaaagaagggctcctaatccaaaacttaaacttcctcaacttcagggcgggcgtcggacgggaaagtggagagaaggcgggcagtgggaggaaaaaagaaagggaaggaagggaagtggaaggaaagaggaccgtggaggggaggaaaaggagaaaggaacggagatggggcagatggcattcaaacagccaggaacggaccggaagggttcgtttcggggtttgggtctgaatttcgagactcgttttaggatactcttttccctttcccagcggcaacaaatgtgactgcagaggcgtgccgggatggaagggtgggaaagaactagacaagcggaggtggtccagccccgcccaaaggggctgggtctggggcccgcccccactcgctcacctcgcgccaagggaggacccgcaacgggcgctccccgcagcggctgggttagccagccgccacgtgggttggcgcttcggctcccagccgagacgggtgtgacttcctgggctcagagactgcagtacagccgcacaggcggccggcgcagccgaggcccccacccaccgaggccaatgggggcggggcggggaaggcagggcccagcttaaccgagagagccgagtggcctcgcccccgggattcggggccggctgcttctggagctgacccgagttccatccagacagcgctgaacactcttattaaaaggctatttaagttttattttattttattttatttttgcttgcttcttgggagtggtaggaggggcatcgtgcttttgttttgaggcaggggagaggttaaaatttactccaagcaaactttttgtcagaaaaatgagactttataccgtattccatttgttgactttttaaatacattcaggtcactctaaagcccattcttagtcaattaacagattaatttcgttccagactgtcataaagagttcgcctggaatggcaaatactgccattcgacaagactaatagaatttcatgggggcaaacatggaagggctgcgagtgtaactgaggttcctgtgcctcaatgaggaaccttagcggggacctggcggggactggaagctcagcacctatttagggagtgactgagctggaaacctggagaagcttggtgcagacgagacggtgcttcttagagctgcattttaagtcctcccattttgctgcatattggaagaactggattttaaagatcttttccatcacctcagattctgtagctaacagccacgtctttttctttttgtctgctgaaagctgtgacctaattgttttaagcacttcttgacaatttcgccaaacccatcctgaaaatattcacataaagtcctaaaataggatgttgtgagtgtaatataaaaataggaaggtaccaatggaagcaacaattagtgttctgagatagaagcggttcccagtttgtaacttggaaatgttaagagcagtacatcagggagaaggtctccaagagtctgacttcttgttctgagctctgagtaaagaaagaaatatgttagaattgtattgtctgcccgcagtaatattgtaaagggttccaatggattccaatgtgattgagcaattacttcctccagcaccaagtccacagtccttaatcttcttgtgagaagattaggtaggaagcgggatgagattcaagacaatcatttaggatttatgtcagaattcaaagttttgattcttttggtagataaaaacagagttggttttaaattgtatttcctgctttcaaaaaaacgaggtttgaaaggaatccccctagatttacataggtttacagatgtaagtttcttctttttccctgtgtttgcaaactggagggagatgcctttgatattccagaatacctgtatctatacacttgtaaattctgctaggaaaggacctaaacagctaaaccaaaggtgaccatgattaatgttaaagatactacccattgttctctcttttgttgtattattaggcttaaatactttggagttaatgattggtcacttaattgagtaacagagcctttgagagcgcaaagatcaactaactctgtctcccaaagtctggcaactaagccctcctttcctggtgagatttaaacatttttgttgacgtcattcatggacaaacatcggtaaacactgtatttaaaatgggatattgccctgtgatggagcagaacttctcaagacacatggttcttttgaaagaaagaattaatgactgtagtaaggtattttttcaccacccacgtagagaaaccagttaggactgacaaacactcattgttgggagttacttgctctggtctgagaaaatatgctgattgttacataggtctgtattttaccagaaaacacaaagcatgtactctccctgatttggaatcagaaaagggggattagatatggatgtcttggccaagctccatttcaattagtgaatttttgccagtttcctcttgtagcctagacttggtaaattacatatatataaagtctgtgtgtgtgtgtggggtgcgtgtgtgtgtgtatgtatacagggtttttaaacactgctaagttcttaccattgaatgtgttagaggtggttgtatttcagaggtcagtacaaagaatctttgtttaatgtgtcagttctgtttcctgaaacacacctctgggtagatttaccaactataaaaggatacaaatgtatatactttccacatctgtatacatcctacctcattcttctaaggattttaagaggtgtttatgtctataaaatgagattacatattttacaataaacatatttgataaattataatctttttattattaaattattgatttgatattacttgaggtatagtggaatgagcactagacttggaatcagaaagtttgagttggactcactagctgagaaaaccaagcaaagatattacttttggacctttagtgtcataatctattaaatgaatatgcagttataaagatcaaaagagtaagtactttgaaaaactatacaaaaaagggatgataatatattatgtcttgggattcatattgatctaattctataattttaataataactgcattacccaagccatgtagtttctactgaatctataaaataaatcagagaggggcatattgttttaaaaattgtttagtttcattaatcagaagacagattacagaaattgactccaatgaagttggacattcagtggaaaggaagaattattcaataaatggtttcaggacaattgatgggtccatgcaaaataagaatcagtctctacctgatttctcatcctaaaagaaatataagatgaatcaaatatgaaatgtagggaataactttttacaaaatgataaaagaaaatcatgggattaaaaaaaataagttaggaatagagaaacctgttctaagcaaaacataaaacccagtgccattctaggaaatactgataggtctgactaagtaaaaattacacaaaagcaaataatatatttggaaaacatctacgacatttgagagacaaaaagctaataactcttgatattccatggacttttatgaataactttgaaaagtccacatctatcaaaatatgagcaaaaattatgtacaggtagtggcagaaagagacatagagttttaaaattatagaaaaaatcgctcagcctcatctgtaattaaataaatagtaattaaaacaccaatgatatgctacaccattttttcaccaatcagaggagtaacaaaaaaaaataatttttttctttttttttttttttgagatggagtctgttactcaggttggagtgcagtggcacgatctcagctcactgcaacctccgccttccaggttcaagcaattctcctgtgtcagcctccctagtagctgggattatgggcacccaccaccatgcttggctaattttcgtgtttttagtagagtggggtttcaccatgttggccatggcagttgatcttgaactcctgacctcaagtgattcacccacctcagcctcccaaagtgctgggattacaggcatgagccactgtgcctggcaaaaatgaaattaaaaagtttgatgcaagtttgtgttggccaggttgtggagaaactgggtctctcatatactgttgtatgaaagtaaataggttcctctacttcaaaaaataatttggcaatcacttttttttgattctttatcaaaagtttttaaaagatgtatatactctttgattcagcaattccacttctcgacattattatatggatggatattggtaccaatatcacccaagacaaatggacaaggatgttctttgcagcattgcttctaagagcaaatatctggaaacagtgtaacaggctcatcatagggaaccatttaaataaaagttgctgtatccacctaatggaaaactatgcagctgtcaaaaataacatggaaaaattgtatttgctgatttggaacattctccaaaatatattgtattctaagtgaaaaaattgatagataaaactgagtatatattatacatctaattatgtaaaatgggtgtatattcattcttttaacaaatatttactgagtgttctaggcattgtggatacaggagtgaacaaaacatcaaagactgctctgttggaacttttactatggtaggtagagaaaggcaattcccaatcacatatgcaaaatggtgatatgtgctaggatgaaaatagagcatgggaaagggaatagagtacagtatgtcttaggtagagtaatgagaaaggagttcaccaggcagagaacagaggagtgctaaggggcgacaatgtgaaaaagcttagccaagtccaggttcaggaattcacatgatgctattacttgtatgaagtaaattcatgaaatttcgcacctaaatcacgtgatttctctctgctgtacaatgattctttctgtgagaaagaaccagtgagcaatatgatatgtgatgctcattacatccactttgtagctgaagtatcctagaaagttggttgtctagggtacctaattagcagaatggtggacaaaaccaccgtgtctctgtccttaagtcaccccttgtcagctgagcttccccaaaatcaagggagaatactaaatatctatttaatagaatcttggctttctctcggaggctgcccatccctggtgtgtcccttatcctccctgcagacatttctcatggataggagttccattgaccttgtcttttatgtctcccaggcaattaaacagtctcagtaccctgtacctggattgttcaatgactttcttcccttctcattgacttcactggagtagaaggctaaatataggcattcactctcatatctctcaggtctttccatgcagacagagttgttatcactagtagacggtgcttataagagagacatggaaaagtggaagaatggaaatagggatttggagtggtgctaaaaacaaagaaagaggcttctgaaagctttccatttaatatgatcaaacatagaagacaaaagatgtaacttaatgaccaaggatagggacatagccttgagaaaattacagaagtggaatgaacgtcttggactccaaagaagagggaatggaaatgcagttctgaggcagctaaagtcaataaagccctctgatatatttactgtagaaataaatgatcatcttttaattcaaggtttgcaaacttaggtgactacaggggcgaggcatggagtggaaatgggtaagagactaagtgggggcagtaatggccttgagcacacagacttaaggggagagactgctgcttggttaatgctcatgatcagccagctgaaatatagacttagtgttgctagaccttctgattttttgaaagaagttagagattttatatttagtgtaaacagtctaatttttaaattgagtaacttattcaaacatatttatgcaacttattcaaatgtatttagagcatgtctgatctcctccttgtattcttacctagtcttaggggtaatcttaaggaaagtgatgcgtatacttgttgtacctatgtagatggaggaccattctcctctccccaacaaaagacacttttataaggattgagtgtggcacaaagagttcgatttttagtatttaaattgagtaggaaactcaaatacagaagatcctttcctgggtcacacctttggtttttttaaatgagatttgactctctagatattgacaaacatcatattattgggtcatggtaaatcttcaagtggactgattcaaaagtgttcaaaagtatttcaggtgttaaggaattgttggcacggagtttcaaaggtgtttctgcataagaaatagaggcgttgatcatgtatttgatctacaaacattcctcaaggatataccctgaacctggcaatgaagaaatattgtgggaattattaagttgaataaagtactagctctgccttccagaagcctactgttctacagaggagattagacatgtttacagataatttgaagtacatagcaataaattataggatgatttattccaagcataaagtgtatattgctactatagtggtaacctaggttataattttcaaatgtaagagccccaaatactattctttttactcttagtgatatgaaactatgttagaacatctgcagaaagtctgaattagtaattttaataataaatattgagtactgatatattgtatatcactgagatttattttatatacattattttatcaattcctatgatcacttcggtaagtactaattttcacaactaagtagtgacagaaaatgaggtttagagagatatagtattttacccaaagtcacagaatataagtagagaatgcagaacttgcattctgggctatttgacagtggagcccagacttttaaaattaggcttataaagatttcctggaaaaaaagaaaaataaaaaatagagaacaaattttcctgaagaaaagtaggaaattattatttataagtataattaaagagagatctttaatttcttttttttttttttttttgagacggagtctcgctctgtcgcccaggcgcaatctcagctcactgcaacctccacctcccgggttcatgccataaagaaagtttctatttgattggtccgacctgattgtctactagaacataggctttccagtagggttaacaagtcataacagttctagtgatataagataaatacaaactaataataaggttaatttagaattatcaacatatgtttttcattgtgaattatcagttggtctatagatggaaaatataagatatataatgtattagcttaaaaaatgctcttcagagagtgtctagaattatagaatttaaaaattttgttttgaaaaggtctaattcttatttcaaaatatataaagaaatcaaatgcaaaaaaattaagagaaaaggtcttaattaattaaatgctgtacaactccaagccctatttatgttcaagatcagttttgtaatttatgactaatttcagcattagcttgttttcaatctaggtttgctaaataatatagaatttcttttccaatgaagtttttcagggtcccagctgaaaaatatataccagttaggatgctttcaactgtaaggaacaaaaagtcacgattttattgggtttaaacaataatgacatttataatctcatataaaatgaagttcaaaggcatggtccactctaggtctaatccttaaggacttacgccttgcctttgctgattctttctcagcttcatttccagaggtatctcacttactcatggatgcaaaatccctacaacagttccagcagaaagattccagcatgataatgtccagggaagaaaactgaccacctcttcctttgttctcttctcaggatgaatctatctttcccagggacccttcactggaggaagagatcccctcacatctcactggccaaaactatattatatactgttccaaatccaatcattggaaaagggaatggtacctctataattgacttaggatatcaggatcatcccttgggctggggtttgacccaggattctccaaagtatgtgactgagggtaggcactagaatggaaccagagttgtgttagaaaggagaaacgcatggctattatagaatagttctaaatgctaccgaggagggcacaactgtaaaaaccaaataatcttttgccattcttttgaagttggcactttgatttctagatggttccccaacacaggttcttctcctcctcatcattatagctgccttgaaatttgagctggaagggaacattctgagacccagattgttaaatgtcttttccaaagtcatgcaataaattaaatggcaaagccagggcagtttcttgactcagtacagggtattttctttcattctttactcttgagactttagaactgttggtactgctttaaaattcatggcaagaactggtcacttttgtaattaacacctccttataatacatttgttttgtttgcttagccagctagaaactacatggagtctgtgctttaaaaagcctgccgaagtccttattctctgttttggtattatgtgcatgaaccaccaattggttccttctcaccttacacttgatgaagatgcctttctttcaacatctttctctattgctccccatcttctcttgctctatttatgatcagctgtctgtttctaaatagactttgtggtcacccatttctttttgtgccagctcctatccactagttacttgaactgtggtctctattgttcttcatacagcctactcacttgtggttgtcacacacatccacattgttatatgttcccaaactgtattctggaatgattttggtaatggctgcattggatgagattcaaactaataattaaagcattgagatagcttctgctattacaagtttactcctgtttttatagtccaagaggagctacttcttctactcttattacttaatgcttaatactacccttattacatacaatgcacaaaaagcatgtgatttatgacccactttaaacctgaatgcttgtgatttactttgtgtttttcttcatttctagg

SEQ ID NO: 22 - DNA, 6090 bp, Homo Sapiens
cagagatggaatgctcaaattaggacaattcagggaggtgtgggagaggtgcagggggaccataagggatggagcaggaacccaaggtagtaatagcagagctggcaccaaccctaggctcaaaaagacaaaggagagagagtggttaccaaaacccagaaagagaaaacccggtaaaagacgggacctggtgaggagcagcaacctgtgtttggctgtggactgtggcaatcttgcagggaggagagcagaggaatgactatcttggcttcactctccttccttctccttcatctcatgtcaggtgccccattggctaaacctaccagcaaccagaggacaaggaatgcattaaaataatcttacggctcagagagtagattagatgtagagtgacaaatggattatatttagcacaatcgcaggtctatttgttgatccgtctccctcatcagactgagttacctgaggacagagaatgtttctcttatatctgtatccctaacatttggtggacactagatactcaagaaatgcttatggacgggatcagagaagatggtaaattgggcattagatggaggtttgtgctttctgagcttgccgcatgctttctggcgaatccaaggcaaaatgagaaacagaatgagctctgtacttttgtctggtaaaagaaaatatgatttggtgagaagaaatgaatacttttagcactcagtgctgggaggaactggaatcagtcatgtgactgcctctatcagaggctctcaactgcgtaacggacagaatctttaatggtgaaaccacaatgcagaaacattcttttttttttttttttttttttttttgagacggagtcttgctctgtcacccaggctggagtgcagtggcaccatctcggctcactgcaagctccgcctcccgggttcaccccattctcctgcctcagcctcccaagtagctgggactacaggcacctgccaccacacctggctaattttttgtatttttagtagaaatggggtttcaccgtgttagctaggatgctcttgatctcctgacctcgtgatctgcccgcctcggcctcccaaagtgggaaacattcttaaaaatattagcccttgataaaaccaaagccatgttacaaaaaagcaaccaaaaggtggaaatgagataatatggtccactttgagctgagaacatcttgccagaaaatgattgtctcagacttcaaatctgacctcctacataaaccttcagtgcaatcctccctgtattatctcttctctcatcagccaaaagatggaaaggataaactgaggaacttacgctggaggagcatggattcattagatggcagaaacctgggtttctgaatgactactgtggagctgatctctgcttatgccctgcaaacctttgtgctgagagcaagtaacacatttttaatgtgttaaacctctgggatttgttgggtcttatagcaatggttattttaccctaatacgactgtaaaataatgttctaaaatctacagtcgggtttgtttaaaatattatcgccatcattattataatccatagtccatatcataattatttttatagaagtccttctcaactggcatctcataatttgtggcttcttatattgttgccttctatgtgtgagatgcctctctgagtcctttttgctagggacatgatagaaaataaaatatccaacattctggtgtattttataatgtacaaagtcctgtttcatgcattatctctttagattctcccaacaaacccaaggaatatgtaagggtctataatcatcttcatttcacaggtgatgaaactgagacgtttacatgtaaagtggaaataaccacttatttatttatttatttattaaataaaaaccccgctaatttatttaaagattaattgagagaattatttcatctgtctggaacctggtatgtgttaagagaaaagttttcttaatttttctttttaagaagataatctattgctacataacaaaccactctgaaataatgacttaaaacattaaaagtcattgattttgctcacagaacttgaactggaagatataaacaactgggagtgagggtggggctggacagctggcttctctgggcatctctcgttctttctgtggttttgtcacatgtctctacatggcagccctagggtaatcatgacagctgaaggctttagagtgggtggagggggagagggagggagggaaagagagagagagagagagagagagaaagagaagcaagcaggcagaagctctaatgccttatgacctaaccttggaaataaattacactgtgccactgccactaccttttcttagaagcaagcagatagggttggtgaatatttattgagaggggaattagactccacctcttgattgggggagtgtcaaagaatttgtgaatatgtttttaaatgaccacatttcccctttctaaaatgcttgtctaaattggtgtacacaaaaagctcgggggttagtgactcatccaaggttattaagctgttaaatggttccaccaatactagatctaattttgtgactccaaatttcatgctctttttcactactccagataatctccggtgaacatcattgtccattagggtagttaagacattctagctgccaaatagattcagtccttttaattgcctcggacaatatattttttattttgcagaaaataaatattacccatatggcagtcatccataaacaccttccaagtttatcccaaacatctgtgttttaaattttttctcccaacagatgtattcatttgcattttcccagatgaatcactctttttttgttgttgttgttatttttgactgtatttctcacctctcaagacccttttgtattatcaagcccactgcttaagctaataccatctcccaatttggggacttccccttgattcctgtgtgcccttcctgtgggtcattaatgcaatgttatttaagactaggatttggctgggcgcagtggctcacgcctgtaatcccagcactgtgggaggccgagccgggaggatcacctgaggtcaggagttcaagaccagcctgaccaacatggtgaaaccacgtctctactaaaaatacaaaattagccgggcatagtcacatgcctgtaatcccagctactgggtagcctgaggcaggagaatcgcttgaacccgggaggcggaggcggagtttgcagtgagccaagatttcacaactgcactccagtctgggccacaagagcgaaaacccgtctcaaaaaaaaaaaaaagactaggatttgacataaggcctgaggggtattcttttgttttgttttgccttgttttcaagaggccaaaatcttcacagttgaaaatttctgttgaaccacagagatttgaaccaactcagtttagaaagcctggggatttgaacaacggtatggatcggaaatctcttcatctgtcagttttcatcattctaggcagtaaaatagatttccctttaggagcttttcaccgtttggggttctccagcagtgggatgtggggaatcaacccttcttcgtctccacccaaacattaggtgggagcaaggggtgggaagtagagaaagtggatagaggtctccagtggatatgggatctttgtgtagaccagcacagtcctcagaaatctcatgcaagcaacataggtactgttatattttctagtggccaccttttaaaaagtaaacaggtgaggccgggcgcggtcgtcacgcctgtaatcccagcactttgggaggcccaggcgggcggatcacgaggtcaagagatggagaccatcctggtcgacacggtgaaaccccgtctctactaaaaatacaaaaattagctgggcatggtgacgcgcgactgtagtcctagctactggggaggccgaggcaggagaatcacttgaaccctggaggtggaggttgccacgctccactacactccagcctggcgacagagtgagactccgtctcaaaaaaaagaaagtaaacaggtgaaattaattttaataatatattttgtttaacccaacgtatccaaaatactatcatttgaaagtgtaatgaatataaaaatattcatgagatatttttcattctcatatccatactgtcttggactctaatgtgtattttacacttacagcacaattaatttgggactagctacatttcagctcaacaatagccaatagcatatgggatagcgcaaataaactctgcgtctctgttgcttctttgggtctcggagacctcaaccctttcttcagattgcaaaccttcttgccttcaagcctcggctccaacaccagtccggcagaggaacccagtctaatgaggtacgctcccttcctgccattctctattccattaacctgtttcgtggtaaacgtaggactgatcctccaaaattaccttattaattagcttacatatttattatctatctgtcccaccagaatgcaggtttccggaaggcagggatttaaaaaaatctgttttgttctatgtgattttcccataccaagcaccgtgcccggcacaagctgggatcccagtacacatctcgggacggaagaaccgtgtttccctagaacccagtcagagggcagcttagcaatgtgtcacaggtggggcgcccgcgttccgggcggacgcactggctccccggccggcgtgggtgtggggcgagtgggtgtgtgcggggtgtgcgcggtagagcgcgccagcgagcccggagcgcggagctgggaggagcagcgagcgccgcgcagaacccgcagcgccggcctggcagggcagctcggaggtgggtgggccgcgccgccagcccgcttgcagggtccccattggccgcctgccggccgccctccgcccaaaaggcggcaaggagccgagaggctgcttcggagtgtgaggaggacagccggaccgagccaacgccggggactttgttccctccgcggaggggactcggcaactcgcagcggcagggtctggggccggcgcctgggagggatctgcgccccccactcactccctagctgtgttcccgccgcgccccggctagtctccggcgctggcgcctatggtcggcctccgacagcgctccggagggaccgggggagctcccaggcgcccgggtgagtagccaggcgcggctccccggtccccccgacccccggcgccagcttttgctttcccagccagggcgcggtggggtttgtccgggcagtgcctcgagcaactgggaaggccaaggcggagggaaacttggcttcggggagaagtgcgatcgcagccgggaggcttccccagccccgcgggccgggtgagaacaggtggcgccggcccgaccaggcgctttgtgtcggggcgcgaggatctggagcgaactgctgcgcctcggtgggccgctcccttccctcccttgctcccccgggcggccgcacgccgggtcggccgggtaacggagagggagtcgccaggaatgtggctctggggactgcctcgctcggggaaggggagagggtggccacggtgttaggagaggcgcgggagccgagaggtggcgcgggggtgccaccgttgccgcaggctggagagagattgctcccagtgaggcgcgtaccgtctgggcgagggcttcattcttccgcggcgtccctggaggtgggaaagctgggtgggcatgtgtgcagagaaaggggaggcggggaggccagtcacttccggagccggttctgatcccaacagaccgcccagcgtttggggacgccgacctcggggtgccgtggtgcccggccccacgcgcgcgcggggctgaggggtcgggggcgtccctggccgcccagctttaacaaagggtgctcctctccaccccgcgaggaggggcagctccggagacccggtcttcagcgagcggggtcttagcgccggggaggtctacttccttttggggttgccattttactattattattgccttttttttttcttcaaaagg

SEQ ID NO: 23 - DNA, 6274 bp, Homo Sapiens
ggatcacctgagcctgggaagttgaggttgcagtgagccaaggtcacgccactgcactctggattgggcaacagagccagaccctgtctcaaaaaaaagaaaaattccatggctctgcttacattatccatctgatcttacatgttgcctattttttccattaaaactcctagcctattaatcatagtttttttataattaatactccgatgtgataatgtcttagtccaattactgtggttataacagaatgccacaaactgggtgatttataaacaaaagaagctgatttaggctgatttagaggctggggagtccaagagcttggtgctagcatctgatgagtgtcttcttgcttcatcataacatgggagagggcatcacgtgtgaagagagcttactcttataacatagccactcccacaagaattaacccaccgccatgagagccatgtgaattcattcatgaggacagcgggttaagtttccaatatatggacttttcggggacacattcaaaccacagcagttagttgtaacgttcgtgtcatgtctcattctggttctgatgcttgtgcagtctcttcaaactgcgtctttgccttttagtgtgccttgcaatgtggaaatgatatactgggtaagaggagctgtagtaaagaggcttctagtgacgtagtgacaagctgtggggagagggagtgttgcacagtcctgccgcatgtcacagtcttccagtgagcctgtgtccctggactgtgaacttcatgcttgcttctcagcttccccagccccttagatggtacagaactgttggaggggggtggagttgtatatttcccttgctctgggtaggtcaccctctgataaaacaccaggttaggcctctggtgaaataatttctcctgagggcagaccttctattaataatagaatgttccaacctatttcaaaatggttcctcttctccttccactgccagaagcataatgagattttccccctaatattcgtggtaaggacctagcagagctccaggaggtaacactctcaagtgtctcatactaccctgcaccatgactgggctctgctggagttcttaatttgcagaactgcccacactgagcctcccgcaatttctcaattacagggcaaactttcccagccggcactgggtccttggaggtttctgtctgctggtttcttcctctggaggttgtgcttctgtgtttgcctgtctctccaatttggggggcagtggtttgcccaatgacctcaattctctgaaagagctaagaagaggtgttaatttttcggtttgctcagctttctacttgttgctagaatggagcgccaatagtgcctcctatagtgacatgtaaccctcaactctagagatgatgaagcatactaatgacaaaggagaaatgcttcagcagttttctgtcagcacattaccccttgaaaaagctgcttcttccacattctgcaagagatgggtctcaactcagagctcaaggcaaatgacttccttcaaggagaaggaataaacagtctcagaaaccatgaaagcctgcccccaggagtgtccctgaacctcagcaggggccacacttaccttgcagaaataggtgaggcatgctcctggtacaaaatcccaatggtacagaaggacaaattgaaaaacaagtctccctctaaacccctgaccccgagctacctagttctcctccctagaggcaaagctgttaccagattcttgtatctccttaacatatatccttagaagagctgtcaagtgaacacatgtttaagtgaaaacctattttagaagtgcattttcttaaggaactttagggttggaaggaacctgtgtcagtccttaattcacaacctccattagtacttattgttcttgcacaaaaatctttctcaaaaaagccctttccactctgacatagcttattctacttttacttagctccaataacttataaaacatatttttgaaagtctaaaatctgccactatgtttttttttcctaatcaatctttactttgacctctaagccagagaaaacaggtggtcaaatgccttttgcctaagatggaacttagaatatttgaagacctcagatcttcaccctgccaaataacgtgtttctcctcccctttcacagagcatttggttttaggaaattcagagccacattccttatagacaagactaaactcttattcaacatactcagaaacttcttctaagaggataaccactcatcagaggaaaaaagtttctcatgtacagctggcaaagggatggaaccatctgtgttattaaaattgacagacgcttatgagatttattaagggaaatactagagtcttagtacatacttgctaatatagcatacatgaaggctttatctataatttttttggccaagcagaaattttggtattactcaccctaacaaatttccaagacattatgaaatagaattttaggtcctgacatcaccatttgtctcaggttttgaagcgttgctggacaagaggggtaaaacacggctctgccttggattcaaagttggcctctcatactagcaagtataccttggtatcctggtcacttctcccggccacagcatcacattgctataaaaggcagatacaagtattaaccagctcacaggttatcagataagcttagtctgaccaatgcttaacacagcaactgggccactattgtcattcctgtggtggtggcacacacacccagcctctgtccgggccatggtctaggaccaccctccacagaggctgtgagctagagccctaactgtgcagggccctaactatgccaggctacttatctctcttaagaggacttcattagtgcctgctcggccatacagttttttacttaccaagtaacacagttatcagcacactccaggtactagccaaggactacaaaatcaacgtgaatgtcagcttttgtatcaaaagctcaaaggagaaactcaaactttacatagatgtcccatgaagatgttcagcaaacccattcttctctgttccctggaatccatcccagtattgtgctatgtgtgtgtctagtaattctttacaaaaagctctgtttcttgtgatgctatcagatcacattgaagaatatacaagccgtactatgaaggctgttgtctcatatagtcctaacgtagtgagaactgatgttcttacatgctgtctttttgggcactcaaagaaattcctgtacagtcttacaaatcagttgtagcttaaattgatttgtgttgtgacttgtacacacaggtcacattcccttgacagaaaatatagtttaaaaccaaatttgcagcccttgttaagtgaatgcacaggactttattgtattcaggtcttttattgtaagactcactcctgtcttcattttatgttccactgttgtgcttcccatttgcctttctctagttttgttttctgtgtttctacggactgctctcagcccaggtgtgcaggaagcacacacatgcctgcagagccttcatggcctctgcattcagggcatgacttcaacgcacagtggctgtactgatttgttaaaacaaaggaacagattacttctcctaattcacagggaagttccaggttgtgcgggcagtgagcagacctgtgtctgtctgcgcttgccctggtgaaaaaccccaccgttcaggctgcagggtgcgagacccaggcacaaacattttgctggatgaggaggaaagatgtaaggttgctccccttcagagacagcaaagggcaggtctgtagcttcacttacttcaggattgtgatttttgacagagccgagagatcagggttgttgaaccaggcctgaaggtcctagtgaatctcgtgaagagaggaggggtctggctgtaacatggacctagaggacatttttactgcaggagaaggaacagtggggatggggtggacttgccaaaggaatatagctcaagttcctgcagcccaaaaaagctcagtttcttttggccaaagcttccgcgagtttccctggcatttctcctgcgggagctacaggggcagtgggacacttagcctctctaaaagcacctccacggctgtttgtgtcaagcctttattccaagagcttcacttttgcgaagtaatgtgcttcacacattggcttcaaagtacccatggctggttgcaataaacattaaggaggcctgtctctgcacccggagttgggtgccctcatttcagatgatttcgagggtgcttgacaagatctgaaggaccctcggactttagagcaccacctcggacgcctggcacccctgccgcgcgggcacggcgacctcctcagctgccaggccagcctctgatccccgagagggtcccgtagtgctgcaggggaggtggggacccgaataaaggagcagtttccccgtcggtgccattatccgacgctggctctaaggctcggccagtctgtctaaagctggtacaagtttgctttgtaaaacaaaagaagggaaagggggaaggggaccctggcacagatttggctcgacctggacataggctgggcctgcaagtccgcggggaccgggtccagaggggcagtgctgggaacgcccctctcggaaattaactcctcagggcacccgctcccctcccatgcgccgccccactcccgccggagactaggtcccgcgggggccaccgctgtccaccgcctccggcggccgctggccttgggtccccgctgctggttctcctccctcctcctcgcattctcctcctcctctgctcctcccgatccctcctccgccgcctggtccctcctcctcccgccctgcctccccgcgcctcggcccgcgcgagctagacgtccgggcagcccccggcgcagcgcggccgcagcagcctccgccccccgcacggtgtgagcgcccgacgcggccgaggcggccggagtcccgagctagccccggcggccgccgccgcccagaccggacgacaggccacctcgtcggcgtccgcccgagtccccgcctcgccgccaacgccacaaccaccgcgcacggccccctgactccgtccagtattgatcgggagagccggagcgagctcttcggggagcagcgatgcgaccctccgggacggccggggcagcgctcctggcgctgctggctgcgctctgcccggcgagtcgggctctggaggaaaagaaaggtaagggcgtgtctcgccggctcccgcgccgcccccggatcgcgccccggaccccgcagcccgcccaaccgcgcaccggcgcaccggctcggcgcccgcgcccccgcccgtcctttcctgtttccttgagatcagctgcgccgccgaccgggaccgcgggaggaacgggacgtttcgttcttcggccgggagagtctggggcgggcggaggaggagacgcgtgggacaccgggctgcaggccaggcggggaacggccgccgggacctccggcgccccgaaccgctcccaactttcttccctcactttccccgcccagctgcgcaggatcggcgtcagtgggcgaaagccgggtgctggtgggcgcctggggccggggtcccgcacgtgcgccccgcgctgtcttcccagggcgcgacggggtcctggcgcgcacccgaggggcgggcgctgcccacccgccgagactgcactgtttagggaagctgaggaaggaacccaaaaatacagcctcccctcggaccccgcgggacaggcggctttctgagaggacctccccgcctccgccctccgcgcaggtctcaaactgaagccggcgcccgccagcctggccccggcccctctccaggtccccgcgatcctcgttccccagtgtggagtcgcagcctcgacctgggagctgggagaactcgtctaccaccacctgcggctcccggggaggggtggtgctggcggcggttagtttcctcgttggcaaaaggcaggtggggtccgacccgccccttgggcgcagaccccggccgctcgcctcgcccggtgcgccctcgtcttgcctatccaagagtgccccccacctcccggggaccccagctccctcctgggcgcccgcgccgaaagccccaggctctccttcgatggccgcctcgcggagacgtccgggtctgctccacctgcagcccttcggtcgcgcctgggcttcgcggtggagcgggacgcggctgt

SEQ ID NO: 24 - DNA, 3000 bp, Homo Sapiens
acatttaaattgcatatttggcttgtaatatattacatatttaaaagaattactatttttctgaataccattaatactaataatagcatcacagtgactaagagtggacttaaataaaggctggcttgaaactcaggtctgccatttattagcaagcttctaaaaattctgagcccttagttttctcacatgtgaaatggagaaaataaatctgcaaaattaattaaatctgtccattcatatttttctctccagtgtatattaactggcattcctcgttaggccagaatgtgctctcaaccatgctccaaatccgctttgtgccaaccccactgccagaaccctttctaccttgagaaccagaaaaggaaacattatgcctggcaatgcctacaccctccaaaataaatctgcaggaaagaacacccagtaagtgatgagagcagcaacgactgcctttatcattttaaatttacaacaccaccttttctagagcctcttaagcattgtagataattccccactcattaaaaaataaattgtaaccataagtattcagggttgatactgcttttgaattagacagtgctcatatcagttgcataagaccaacctaaagtagaggatgaaatcttttttctgaacctttttcagaacgtaacttagtgaatatattaaaactaaactttctttgaatgggagtaatttctacggattaatctgtaatctcttagaccacacctaaggtaatgtagaggttgttgtatcataggctttgtgattagagaccactggatttgtctttggaaaagtcactcatgattctttgggctttggtttcctcatcttttataccggcttaataatgaccaccgtagagttgtcatggaagttaaatgaactcatgtaccataagtgaccaatacaatgattgacactcagtgatttatcaataaattaaaacatttattatcaatatgacagagaaggtgccgctaaaatagacaataggtttttggaagaggtgattaaatggatgcaaaatttatggattgtttattccgtctacctttgctgtgtcccctggttgtggcatacacacgtgtgggtataaaatcgtaaatcctatgtagtcgcgtagtgcatgcgcagaaggcttagacacgaaatgtcatttcagcaatgtgcctagagaagctctgacgccgccttggaagtaagtcgttgctgcctgacctttgggcgtctgggacggatgcctatacctgcacccagcagcactggaaggggcccaggcccttcgcagcacagcctatccccagaccgcttagtccttcataacatatatctccacggaaaagggtatttcctcccgtcagaaaaagcgccccagtctggtctgggttggtttttatttcacgttgttgcaagtaggcgaagtcccttctgtctcctcccttggggtaagtggaaaggagtccggcagggggcccgcagtggcctgcacaggggaactgggtagcgagagagttccaggcaattccgggggctgccccacagaagcaggtggggatcgacagtggctctccggcccagggaggagagcgcggtcgcgggtccctcccctcagcctggaggctgcagccgctcgagtcggcccgggtgggggcggggtgggggcggcgcggagggcacggagattacggcggcgccacccgggacatccagggccccgaggccctgggcggtccccacgcgagatcgcaaaccatgacaataggcagtcacccgaggtcaaataaaaacggagtgggtcccccgcgcgccgccgccccccgcgtccctggcggcctcccccgaggcccccggcggcctcacgagcccgcagtagccggtggcgacgtcgcccccgccccacctccctgcgcaagtgcgaggctgccggcagcgcggcgcacgctccggccgttcccggcttccgcgcaaaacttccatcctgtccacgtgaagttgtcgctgccttagagagggggaaagagctgcgggaaaagccggggagtgacgactgcggcggctgggcgcgctctctcattttcttttcttctcctttcccccctgtcgcagtccggagttttggctcctctcctttcctcctccccctcggagccggcttctccctccgccccgcttctcccccgcttgtgtacgctatttgttgtggggtggccgaaggggatgtcctgttttcaccagaggcacagcgcgaaggggaaacttcgacactggaaggaacgagaataaatacttaattacggacgcactgaaccgcggctgggacagacacttcgggaacccgaggcggaccgggcgacgaggtgagtgaccccttcttccaacccccgccccagggctcccgggggagcctgagttgagagaacccccaaactttccgggaaagtgcgcgaggctccgccggggacgccgagcgctgggtactgaggacgcgcagctggacggtgcgtgggcgcctgcgtccccggggggcgcttggaggccgggtgccccacgcctgagggcccgggccgctcggaccgcagcggtgctctctgccctagaagacgtccccaagccccaagggtcccttccgagcctgcctgtcccttccggggtcggcgcggagcctgcgcgtaacggagttcatccagcagtccagcgcgcggcttctacctgcaccccgcctccacctggcagaggcgcgagcatcggggtctcccccacatctttcttatgacgtgtattactttctgatgaccccctagatggtccaggcgcgaggatgctgacccagagtccttcggagggtcacaggcgcctgggctttcccggtgccgggtgcgtgtgtactttaaaggctcgcgttctaatctccaggcactgatcgggcttttcaactgcggcgatcccactttaatagtttttatgtggcgtggactgaatgtc

SEQ ID NO: 25 - DNA, 5649 bp, Homo Sapiens
cggtggctcacacctgtaatcccagcactttgggaggctgaggcaggcggatcacaaggtcaggagatcgagaccatcctggctaacacagtgaaaccccgtctctactaaaaatacaaaaaattagccgggtgtggtggcgggcgcctgtagtcccagctactctggaggctgaggaaggagaatggcgtgaacccgggaggtggagcttgcagtgagccaagatcgtgccactgcactccagcctgggcgacagagccagactccatctcaaaaaaaaaaaaagaaaaaagaaaatatcttaagctttgaggaccacatagtctctgttgcaatcactcatttgggccactgtagcacaaaaacaaacatagataacacacacatgagtgagcatggctggggcccaataaaactttatttacacaagcaggtgatgaaccacggtccatagtgtcccaatccttgatttagatggtgaactatcatgagctttcgttgccctctccggtagaaatatgggagaaaccacagagagaaacagagatttcaggaaaacagtaaaattaaacaaataaagtgagacgtcgcccctcctggaggctgcaggctgtgttgaacctgtgtgtgtctgggtgtacagggatgtgagtagatgcgcgtggagatgtgtgtgtgggtggagactgagcgtggctggaggtggctgtggtaggatgccagaaggaaggagtttgcattcagttcctttattagtactctctggagttgttgaggggatgtcactgctgaacactgaccctggtgcaggctaaaccgaagttagcctctgctaccctctgctgggtgaggcactggggagaacagtgggactgaatggggcgggctttctccctcccacacttcccctggaaacacccagcaccagcacattagaacatggggagccaccttccccagcgctgcttcccaaggttcggaaggggaaactctgacctcaagctctgtttgaagagcgatagcaaaggggagaggttggctgtggtttggtggtgcttatctccttcctttgctttgaaaccacaggctggcatactacccgagagaatgaccagtgccaccaagggaagggcacaagctcactggttccaggggagacatctcaggggacaggaacatcccctgacgctgaatgagtgcagcacacagacggagaatacacacaagagaaatcatgaggacatgagagaaggcactggcaataggaagttacaaaaagcaacaaaaagaaagagtagatataaaaacaataatcgaagaaagccaacaacagatgggatgaatcatacgaggtatgcgactcatggatgaagaggtgagtgatgagatcagctggggaactctctcccaggaaagacaaaccagaagaaacacaaatgacatcgaagtggccaggcgcagtggctcacgcctgtaatcccagcactttgggagcccgaggcaggtggatcacttgaggtcaggagtttgagaccagcctggccaacatgatgaaaccctgtctctactaaaaatacaaaaattagccaggtgtggtggcaggcacctgtgatcccagctactcaggaggctgaggcaggagaatcacttgaaccaggaagcagagattgcagtgagctgagatggtgccagtgcactccagcctgggcagtagagtgacagcctgtctaaaaaaaaaaaaaggcagtaaagtgataggaggatagattagaagggccattttccagatagtgcaaggaagaaagaagaagaagaagaggaggaggaggaggaagaggaagaagacggagaagagggcatctcagaagaaacaatggagatacatttctcaaaactgaagaaagatgaccaacctcagaccgaaggccaagaggcaaaccagagagacagcttggcaagccaggaagagcaccaaagctagacaattagagtgaaattaaagaaaacccaaggtgacaaaaatttaaaaagcttccttgtgacctcagtccattggtgaaaatttaaaaaaaaaaaaaaaaaaaaaaggacagcctgggcaacatggtgaaaccccatctctacaaaaaatacaaaaattagctgggtgtggtggcacatgcctgtagtcccagctattcgagaggctaagtaaggcaggaggatcacttggggccaagagttccagaccagctgcggcaacatacatgttgtgggaagtcaggcaccccgaacggagggactggctgaagccatggcagaagaacataaattgtgaagatttcatggacatttatcacttccccaatcaatactcttgtgatttcctatgcctgtctttaatctcttaatcctgtcatcttcgtaaactgaggatgtatgtcgccttaggaccctgtgatgactgcgttaactgcacaaattgtttgtagaggacaattgttgtgtgtttgagcaatgtgaaatctgggcatcttaagaacaggataacagcaattttcagggaacaagggagataaccttaaagtctggctgcctgtgggctgggcaggacagagccatacttctcttattaccgcaaacaggtaagagaaatatcgctgaattctttccccagtaaggaatattaataattaacagccctgagaaaagaatgcattcccagggccgggccactgaaatggcctccctgagagtgcctgcctttattcagaagtagaaagggatgaaacacgccctagtctcctgcagcacccccagacttgataggattaggaaattccagcctggcaaattctagtcagaccggttctctgctcttgaaccctgacagtgcgtgccagtgggacctggaagttcattagtgattctagtttcgccgtgaccttctgccctgtgatcttttgtcgcccttgaagtatgtgatctctgtgacccacaccctgttcgtgcactccctcctctttgaaaattgctaataaaaactcgctggttttacggctcagggggcatcacggaacctgcggacatgtgatgtctcccctggacacccggctttaaaatgtctctcttttgtactctttccctttatttctcaggccagccgacacttagggaaaataggaaaggacccacgtgaaatattgggggctgaatttcccccgataataagtctcttaaaaaagacttttaaatgaaatttctttgttttttaacttttatttctgttttgggggtacatgtgaaggtttgttacataagtaaactcgtgtcttcggtgtttgttgtacagaatatttcatcacccaggtattatgccgagtacccaatagttctcttttctgctcctctccttcctcccatcctgcaccctggagtcaaccacagtgtctgttgtttccttgtttgtgttataagttctcatcatttagctcccacttacaagtgagaacatccagtatttggatttctgttcctgcattagtttgctaaggataatagcctctagctccatccatgtcccacaaaagacatgatctagttctttttaatggctgcattaaatgaagttttaaagatacaacataaacaccaacctcttccccaccacaaaaatcccttgctgaatttgattacacttaaattaacgagttttgtttcatgaaagactccttggacaaacttgacagttgatggaataggagaagctgtctgtcatgtctaaagccaacaagagatcaatatctagaataaatggagatctgcaaatcaacagaaagtaggcagcaaagccaaagaaaatagcctaaggcacagccactaaaaggaacgtgatcatgtcctttgcagggacatgggtggagctggaagccgttagcctcagcaaactcacacaggaacagaaaaccagcgagaccgcatggtctcacttataagtgggagctgaacaatgagaacacatggtcacatggcggcgatcaacacacactggtgcctgttgagcggggtgctggggagggagagtaccaggaagaatagctaagggatactgggcttaatacctgggtgatgggatgatctgtacagcaaaccatcatggcgcacacacctatgtaacaaacctgcacatcctctacatgtaccccagaacttcaaataaaagttggacggccaggcgtggtggctcacgcctgtaatcccagcactcttgggaagccgaggcgtgcagatcacctaaggtcaggagttcgagaccagcccggccaacatggtgaaaccccgtctctactaaaaatacaaaaatcagccagatgtggcacgccacctataattccacctactcgggaggctgaagcagaattgcttgaacccgagagcggaggttgcagtgagccgccgagatcgcgccactgcactccagcctgggccacagcgtgagactacgtcataaaataaaataaaataacacaaaataaaataaaataaaataaaataaaataaaataaaataaaataaaataaaaaaataaaataaaataaaataaaataaaataaagcaatttcctttcctctaagcggcctccacccctctcccctgccctgtgaagcgggtgtgcaagctccgggatcgcagcggtcttagggaatttccccccgcgatgtcccggcgcgccagttcgctgcgcacacttcgctgcggtcctcttcctgctgtctgtttactccctaggccccgctgggacctgggaaagagggaaaggcttccccggccagctgcgcggcgactccggggactccagggcgcccctctgcggccgacgcccggggtgcagcggccgccggggctggggccggcgggagtccgcgggaccctccagaagagcggccggcgccgtgactcagcactggggcggagcggggcgggaccacccttataaggctcggaggccgcgaggcttcgctggagtttcgccgccgcagtcttcgccaccagtgagtacgcgcggcccgcgtccccggggatggggctcagagctcccagcatggggccaacccgcagcatcaggcccgggctcccggcaggctcctcgcccacctcgagacccgggacgggggcctaggggacccaggacgtccccagtgccgttagcggctttcagggggcccggagcgcctcggggagggatgggaccccgggggcggggagggggggcagactgcgctcaccgcgccttggcatcctcccccgggctccagcaaacttttctttgttcgctgcagtgccgccctacaccgtggtctatttcccagttcgaggtaggagcatgtgtctggcagggaagggaggcaggggctggggctgcagcccacagcccctcgcccacccggagagatccgaacccccttatccctccgtcgtgtggcttttaccccgggcctccttcctgttccccgcctctcccgccatgcctgctccccgccccagtgttgtgtgaaatcttcggaggaacctgtttccctgttccctccctgcactcctgacccctccccgggttgctgcgaggcggagtcggcccggtccccacatctcgtacttctccctccccgcagc

SEQ ID NO: 26 - DNA, 12781 bp, Homo Sapiens
cactatgttgctagctggtcttgaactcctggcctcaagtcatccttctgtcttggcctcccaaagtgttgggattgtaagtgtgagccactgtccctggccagttggtgatttatttgtataactgtccaatttattgaatacgtatggcgtgccaagcactgggctgagggcttcataatgccctttcactcaatgcttagcacaacccatgaagaaggtagtgttaatatcatccctgttttacagatgtagaaactgaggcacaggctaaataacttgcccaacaagctcgtgcagtttagtaagcagctcagctgggatgtgaacacaaactttgaatacagagctcttaaccagtaggccagaggttcccaaacacctagtatatttactaccttagtactttcctgccacatctcctaggccaaaacaactccattgattgttatgcaatttactaagtgtagccatttgaaaaaaaaatacatataaaagaaaaatatttttattcagttttcaaaataacccatatatagtcatggaatgtatgtgttggttgggcactgcagactaaagacagtttagggccgggcacggtggctcaggcctgtaatcctagcactttgggaggccaagtagagagaagggcttgagcccaagagttggagaccggcctgggcaacatagcaagacccagtctctacagaaaataaaattatcagggtgtgaggacgcacacctgcagtcttagctgcttgggaggctgaggctggaggatcagcctgggcaacagagtgagaccctgtctcagaaaaaaaaaaaaaaaaagacagacttttattcagatatgcatgcaggagttcacagaaaaaaaaagtgagtccaggaggctgttatttggcatttatacaactttttttttcttgaatctcgaaatctactttatatataccatttaataggggaagaggagggagaaaaagccttccatgggaagaacaaataggtttctgggggaacaaaagggagataagaatgtttgtttttgcaggtgcaagtggtctttgtctttttttctggccactaaaactcccctagagaggagatttacggcagcttcactcccagaaatttctgctgttagtcgcataagggaagctttgaaacggcatctttctgcatctgttggctctcaaatgtcttcagttccaagtaacattcatgccaattctgggggtctgagtgtccccacataatacatgtgttctcttgtcttttaatgaagtttgtgggaggcatctaactgtagcctccaaaatttggcccataggtactactgtccttatcaaagacgaggaaacaagttcagaaaagtattaattgctccgagttatctgcttggctagctaggatcagagctcagttctccatttaacccaaagcccaggctcttaacctcttacaactggcgcatcccctctgaacctccatttcctccctgtaaaagaataacatcggccgggcgcagtggctcacatctataatcccagcactttgggaggcagagatgggcggatcacgaggtcaggagtttgagaccagcctggccaacatggtgaaaccccatctctactaaaaatacaaaacttagctgggtgtgttggtgcctgtaaccccagctactcaggagactgaggcaggagaattgccttaacctgggaggcggaggttgtggtgagccaagatcgtgccattgcactccagcctcggtgacagagcaagactccatccccaaaaaaacaaacaacaacaacaaaaagagaataacgttatattcagttgaaccaaaatgaattaaatattaatatttgtacttcaaaaacggtccagcttggctgggcgcagtggctcccgcctgtaatcccaacattttgggaggccgaggcaggaggatcatttgaggtcaggagtttgagaccagcctggccaacatggtgaaatcctgtctctactaaaaatacaaaaattagctgggcagtagtagcgcgtgccggtaatcccagctattcaggaggctgaggaaggagaattgcttgagcttgggaggtgaaagttgtggtgagctgagactgcactactgcacaccagtctgggagacagagtaagaccctgtctcaaaacaaaacaaccaaaaaaccaaaaaggtccagcttgggcaacatagtgaaacttcgtctctacagaaaatttttaaaatactagcagggcaccgggcacagtggctcatacctgtaatcccagcactttgggaggctgaggcaggcgggtcacttgtggtcaggagtttgggatcaggcaggccaacatggtgaaaccgtgtctctactaaaaaacaaaaattagctgggcatggtggtaggcaccagtaatcctagcactcaggaggctgaggcatgagaattgcctgaacccgcaaagcaggggttgcagtgaaccaagatggcgtcactgtactccagcctgggtgacagaataagactcctcaattaaaaaaaaaaaaaattagctgggcatggtgttgcgggcctgtggtcccaggtactcaggaggctgaggtgagaggattacttaagcctgggaggttgaggctacagtaagccaagatcacgccactatactccagcctctgtgacagagccagaccctgtctcaaaaaaattttaaaaagggcaaattttggcaatttcacatagttcaacctagtataaggtggttgtaataactaaatgagataaaatggtgttaaattggaagtattatagtatttctgttaacaacatagggctccagaaccagcttccttgagtttaaatccaggctccaccacttcctagctatgcagtcatgggcaagttacttgacccaactgtgcctcagcttcatccatgatatggagatacaggataaccagcctcttacgtgcaattctgaaatccaaaaagctctgtaaaccaaaagtttgggggtaaactcatttggtagcaaattttgacctgaggctatttatagtctatattctgtattctttctacttagtatgaataagcatgtaagttttactgcatgtttgatttcagcatgttcccccagactctctgggggtgtttacgtatgccggtgggggaaagagaccaactctcaaatattatctcaaacagttggtttcactgtgcttgcttgggtagcacatataccaaaattggaatgacccctgcacagggatgaaatgcaaattcgtgaagcatactgtatttttcttagcacataccacctttggcaatattctttttttttttttgagagggagtcttgctctgtcgcccaggctggagtgcagaggcgcgatctcggctcactgcaagctccgcctcccgggttcacaccattctcctacctcagcctccccagtagctgggactacaggcgtgtgctaccacgccaggctaattttttgtatttttagtagaggcggggtttcactgtgttagccaggatggtctcgatctcctgacctcgtgatccgcccacctccgccccccccccgaagtgccgagtgctgggactacaggcgtgagccactgcgcccggcccccgccttttttttttagattgattttattacttgcctagcaaaggagaaccttctggcagaacagtctccaagaacaaggcaaacaactaattttacataggtttttaccaatgtacagctgttgattgtgactggtttccggcaatctggatttcacaatctggataaggggacaaacaattgtctgtcttccactatctttcttgaatttgaatagaacctttttattctcatagcctcttagctttctttcttttttttttgagacggagtttcgctcttgtcgcccaggctggagtgcagtggcgcgaccttggctcactgcaaacgctgcctcccaggttcaagttattctcctgcctcagcctcccaagtagctgggattacaggcgcatgccaccacgcccggctaatttttggatttttagtagagacgggggtttcaccatgttgactaggctggtcttcaacgcctgacctcaggtgatccgcccgcctcggcatcccaaagtgctgggattacaggcgtgagccactgcgcccggcctctcatagtctcttagctttctaaaatttgaaaaatcctgtaaagacacacctgggtcaaagggctcagataacggactgtggcccttaagtacttacgtcacaggttattgagaggatcgatttagttaccagatgtaaaatgctgggatcagtgcctggcaaaggaaaactttgtacagctgcaggctttcaccatacacaacagcatcgctaacgaatgctattacaatattcatttagcgtttaccaagtgcctactctatacaaatcttgagaatacaacgtgaaggtgaactgctgactaaagtttggtccctttcgctccgtctccttgcgaaaatgctctaacggcaggaggtcacgcgagcgctggacgcgtttctccccgcgagcccctttccgaggcctttcgggtccccccggttatccccgcccgggcggtgcgcgcccccgctgttcccgcttccgctccagagaggcagggctttccgagcctgctagccccgcggccgcaactaaccccgggtcggagtgttccggcccggccagccccgcggcgtgagggaaggggagctcagcagttccccgcgcggggcccaggcgtcggcggcagggcgggcccctcaccgccagcgtgccagccccgcccctacccaccagtgtgccagccccgcccttccccacgtcgccgcgcgcccgggggcggggcctggcgcgcaccgcccgcgcacggcgaggcgcctgttgattggccactggggcccgggttcctccggcggagcgcgcctccccccagatttcccgccagcaggagccgcgcggtagatgcggtgcttttaggagctccgtccgacagaacggttgggccttgccggctgtcggtatgtcgcgacagagcaccctgtacagcttcttccccaagtctccggcgctgagtgatgccaacaaggcctcggccagggcctcacgcgaaggcggccgtgccgccgctgcccccggggcctctccttccccaggcggggatgcggcctggagcgaggctgggcctgggcccaggcccttggcgcgctccgcgtcaccgcccaaggcgaagaacctcaacggagggctgcggagatcggtagcgcctgctgcccccaccaggtagcggggtgggggtggggtcgaaggcgggggcatagcggcggggcgcttggaacccggcgaggggaggctcgcacagggggttgggggggtgcacggcctggccctgggctcggaggaggcggggccgcagagttggcttgaatgagtgcaggggtcgagtctggagcatttgggggtgtagcttgtaaacagggtcggaggagagaggctgtgcaggaagagggctgcaggggagacgcggagagttcgggccttttggagggaggagacgcgtcccgccaggtgggggtgctgggctaaggaaggggcgacgcgcgcagctccgggtggggagggggcctgggaggtgggagcactgggggtggggcgagaaggggaaggcgcccggcccacttggtgggcggggcggggggcggggtggcgggaaggaggaatgcctgcgggaggccgaacggggagagtccggtggtgtggggtgcgaaaggaggttcctcggccggcgcggagatagtgagttggggctccagtagtcgatcgaggtagacacttagaggtagttaagagccgcggtcgccgagacgccttggggacggtgggccttcggcctaggtgaggggccgccgagggggtgggccacgagctgcgagcgcgggggggtgtgtcaccatggggaccgcggggcctaattgggcggggcggggccgtggggagccgaagtgctgggatccggctgggtccttcggtaggtaggctgcacgtgcaccgagacgaagatagaatattttgacgtatgtggaaattcgtgtcgagtggaaaatattttattttatgaaatagtgtaatttttatggggcaccactgggcttttagaggccttaatcgggcgctggacaaagatgtgtggacgtgagtgactccggggaagcctgtcgggagttgtcctcactttatgggcagttaagtgcttttttttttttttcctttttgagagagagtttcgctcaagtccaggctggagtgcaatggcgcgatctcagctcaccgcaatctccgcgtcccggcttcaagcgattccccagcttcagcctcccgagtagtcgggattacaggaatgcgcccccacaccccgccaattttgtatttttagtagagacggggtttctccatgttggtcaggctagtctcggaattcccgacctcaggtgatccacccgcctcggcctcaaagtgctgggattacaggcgctagccaccgcgcccggtctgtttagggctttttatccgggcagctggcgacattttgaaaagcttgcttttgctgtttgccagatacatatatatgtattttgagacagagtcttgctcttttgtccaggctagagtgcagtggcgcgttcttggctcaccacaacctctgtctctggatcaagagattatcctgcctcagcctcccaagtagctgggactacaggtgcgccccaccacgcctggctaatttttgtatttttagtagagacgggtttcactatgttggccaggctggtatcgaactcctgacctcttgatcggcccgcattggcctaccaaagtgctgggattacaggcatgaaccaccgagcccggccgtttgtcagatactaaacacaaagtttaatggtcgctatttgaacaaacgaagaaataaaggctcagaaaaaataactcattcaagataagagccagttcgtgttttttgtttggttttgttttgaaatggagtctcgctctgtcgcccaggctggagtgctgtggcgctttctcggctcactgcaacctctgcccgccgggttcaagtgattctcctgcctcagcttcccgagtagctgggattacgggtgtgcccaccgcggtccggctgatttttcaccatggagtttcaccatgttggccaggctggtcttgaaactgctgacctcaagtggtccacccacttcagcctcccaaagtgctgggattacaggtgtgagccaccgtgcccggccgctagttagtggttttgagtaatggatttcaaatccatttaaatccagtttaaagtgtcctaaaggaattctgagatttttctaagtgtaattatagtgttacccttgtttaagcgaccctttcccgcagtttaaatatatatagttgtgcattagtagaatatgcttgtggggaacagagccagcatccgcaataacaaactcctggttagaaaagcatgacgtattgtttacttgagcatgaattgattgttgaatccaaaccaaacgggtgtatttattgtaaggatgtactttacattcatattgaatagcgtatgttatttgtttcttgaggttgagtttaagagacttgtaaaaataaaacgtatacatttcacctcccgttatggagaggattccagggtattcaagaaagatgggcatttgatactaggtttctaaagaaactgcagtgtctagatcactctgccgagcacagcattaggcattatggatcctggatacaaccatgaacaggacaaagcaaagaggcaattgtagactccaagtggaaaggggacggagaggatgcgggtcaggctaggctctcagctctgtaaaccgaaaccagaaggacaaataagcttagacagattatagtgagagtgggaagctggttcaggaagaggaaggtctgcaaattgtgggtaggatgaaaggaggaggagggagcattggagaagttaagcagagatccaatcatgaacagtctgatgagctacagagacattcggacttactccatgaatcatttaagccttaaaacatgttgagcgtattttttttttttttgagacggaatttcactcttgttgcccaagctggagtgcagtggtgtggtctcagctcactgcaacctccgcctcctgggttccagcgattctcctgcctcatcctctcaagtacctggtattacaggtgcctgccaccacgcccagctaatttttgtgtttatagtagagacgggtttcaccatgttggtcaggccagtcgtgaactcctgacctcaggtgatccacccacctcagcctcccaaagtgttgggattacaggcgtgaaccaccgcacctggccgtgagccaccgtgtctgtccgagcatcttttaatgtttgtcatttagatttcttcttgtgctgaagtgtttgtcttttgctgtttcttttttttttcctagttctttgtcatttgtgtgtgatataaatgtcttctttcacaatgagttctttcatttagtttatggctttgttgttgttgttgaataatagaggtctcactttgttgcccaggctggtgttgaactcttgctctcaagcgatcctcccacttcagcctcccaacctgttgggattacaagtgtgagccaccacacccagccttatggcatctttcgatgaacaaattattgattataatgtggaatttgtccttttattttctctgtggttagtgtttctataggttttatttaagaaatccacagggaggctgggtgcagtggctcatgcctgtaaacccaacactttgggaggccaaggcaggccaacatggctagaccctgtctctccaaaaaataagaaaattagccaggcatggtggcgtgtgcctgtagtcccagcttcttgggagactgagatgggaggatcgcttgagtccaggaggttgaggctgcagtaagccaagagatcatgccatgcactccagcctgggtggcagagtcagaccctgtctgccaaaaaataaaataaaagttggtgaaaatgttgattatatattttaggaacaactagtaattgacatcaaaattatgggctaaagagaaagcaaaaataatgtgattttaaaccagaattcaaaagatctgtttagcgtatgtttagacaaagccattacttattatatcaaagttttaacatttattttgtgagctgtcagcttttcctcttaacatttttccccaccgtcttaaaaaaccccaagaataccggacatttaagactcacttaaagctttaaaagcacttgcaaaatcctaaaatcataatttaaggtgtttttggagggcaggagcaatggtggcaggcagtgttttgctttgttgcccaggctgaagtacagtggcagatctcggttcactgcaccctcgacctattcggctcaagtgatcctcccacctcagctttctgagtagctgggaccccaagtgcacaccaccccatgcctggctaatttttaaatttttttgtagaaacaaggtctcactgtgtagcccagatggtctcgaattcctgggctcttaagagatcctcccaaagtgctgggatcataggtgtgagccaccacacctggcctattttggcattcttgaaaaccgcaggattaccacggataaaattttaaaattacctttaaagaattcaggtttacacacaaaaaaaatttggtttgttagcagtgagtgaagaaaaattttgagaaatgtttaaaatttttagttttgttacacaatacattttactacctgtttaattatcttttttgactcagaaaccagtttcctgggtccaggatgtttagtggtactctttttcttcaagctttttagcattggaggaactgcatattagtaaaatttttagtcttagcattttatagcttactgctatttcttttctttcattctttctttcttttttttttttttttttttttttttgagatggagtctcgccctgtcacccaggctggagtgcagtggcacgatctcggcttactgcaacctctgccttccaggttcaaatgattctcctgcttcagcctcccgagtagctgggattacagatgcccgccaccatgcccagctaatttttatttttttagtagagatggggtttcaccatgttggccaggccagtctcgaactcctgacctcgtgatcaacccgccttggcctttcaaagtgctgggattacaggcgtgagccaccgtgcccagcctttttctttttctttttctttttttttttttttttgagacggagtcttgctctgttacccaggctggagtgtagtggcatgatctgggctcactgcaacctccacctcccgggttcaagggagtctcctgcttcagcctcccgagtagctgggattacaggcgcctgccaccatgcccagctaatttttgtatttttttagtagagatggggtttcgccatgttggccaggctggtcttgaactcctgacctcaggtgatctgcctgcctcgtcctcccaaaatgctgggattataggagtgagccactgcgcccggcccagcatactgctatttctttctttctttcttcttccttttttttttttttgtttttttttttttttttttttttttgtgagacggagtctgtcgtccaggctggaatgcagtggcgttttcttggctcactgcaacctctgctgcccgggttcaagtgattctcctgcttcaggctcccaagtagctgggattataggcctctgccactgcacttggctaatttttgtatttttggtagagacggggtttcaccatcttggccaggctggtcttgaactcctgacctcgtgatccacctgccttggcctcccaaagtgctgggattacagacctgagccaccgcacccggcccatactgctatttcttaacagcagagaaattatgtgtcagattctgtaagtgtaatggtatataaaggataaaatgatgttgaaaaacaaaattttttgtttaaatgcttatgtttctaatattttatttcagaaaggaatttatttcaaaactgataatggttggatccagcttttcacacaaacttttttttcctagtgaggatgcacatttatcctgtaaacaaatggaagacattatttttttaattgcttgcttagaaatgaaataattcttttctaatgatcttttaaagcatgagacctcatacatcatttaaaacaatttatactgtattttacacatgacaaagttctaaggtaacagcccttttctaagactaaagttacagtcctccctttgtatctgagggggattggttgcaggacccccctgtgaatacccaaatccttggatgtccaagtcccttatgagatgtagtatttgcatataacctatacacatcttcccctgtactttatctctagattacgtacaatacctaatagaatgtaaatgctttgaaattagttgttcagctgtattttaaattttgtattttttttcctttttttttgagacagagtcttgctctgttgcccaggctggagtacagtacagtgatcacagctcactgcacctttaacctcccaggctcaagctgtcctgcctcggcctccccaagtgttgggattacaggtgtgagccatcatacctggtcactgttttttattggttttaaatttttgatttaaaatttttaatctaggttggttgaatctggactggaacccaaggatatgtttgttgagcatactgtatttactttggaatacaactagaatgcttaacttgtatgttaaaaatactttatttggccaggcgcggtggctcacgcctgtaatcccagcactttgagaggccaaggcgggtgaatcatttgaggtcaggagtttaagacgagcctggccaacatggcaaaaccctgactctacaaaaaaaaggtaaaaataagccaggtgtgatggcgtgtgcctgtagtcttggctattcaggaggctgagacacaagaatcgcttgaaccggggaggcacgttacgccctcagttgttgacttgagtttttccgtagtttgtagggggagggtaatagagtattaggtagcttttggaatacataggagtgtaactggaaaaagattccaagcaagtctaatgaattagataatttacctaattagtaaattatgtaatcagtatgctttataataatattgtgagttagatcctgtttctgatatgtacataccatattgtataggtgctactaatttggagagcatatacagtgagtccatgcctttttcctgccatcagcattataccaaaattctgccatggtttttaaactttgattctgagaaagtttctcaccctaataacataactatatttgtgtttgtcttcatagttaaatatgcattatgatatcagcttgcatacattttttaaatgacttgaatatctgactttaaaaattattctagaatttctgtgcttcaatattaatgccagaagacttggaattgtttatttgtaggtaactgcctttaaggaaacttgaccaaatattaactaagttatgtatttccttttggcaacagt

SEQ ID NO: 27 - DNA, 1631 bp, Homo Sapiens
ggatccagaacatggggcggactcaggcagcggcgggaatcaggcggactcgtttggaccgaagcctccgccaggcaccgaagccgtgaagtcgcctgcgcagcaaagggagcctccggggggcgcccgagaccttggtgtcgctcgggggccgctggtagccgcgcccgctgcccctcgcccggtgactcagccggtacctctggcggggccatgggggccagaggacagcgcggggggcggcgagcgcggttgctaagctctccaaggcctcggagggacaggatctgggcgcacctcaccggttgccatggtaacgcagcgccccagcccctcgcgctccgcggtggagggaggcgcagccaatcggaagcggcggagttctcggggacccccccccccccgctccacgccgtgtgtgggcgggggtcaggaggtgcggggcggaggcggagcgtgggccgcggagatccggcgttcgcaggaggcttggtgcgcggcggggctgcacggggccacttccggagtagtactgcgagcagcggcgcgacagtgcggggtcccctttctcccagaagagacgtcacccacacaaacctgaccttcacgtggggcgcgggaccttgcggggtcccagccgcaggcgcccctgttgtttccttcgggcgggtgggttggagaagaagtccacgcgggattcttcaaaacggcgtacagggggattctagggccccatggttacttctttggaccccccggaggcgctgtccagccacttccagtcgccctgatgactcgtcgtgggttcctttaggagacccgaaagttcagggcgggctgtgtgggtaacacctctgcccaggttcccggagggccctacgtggctgcccctggagtatcccagagcgctagggctgcgggaaggggcgggtgtgcttctggaaacatgagcgcctgttagtatcagtgcctggatagggctggggacaaatcagtttatgccgcgcacaccgaatccatgcgcctgagtgagggtgggtgtgttggggagtgcgtccaagtggacagtgccgtacagtaatgtctacggggagttccaggagagctcggctactcctgcgcaggataacctctcccccaccacccgagtcccgtgctcgcgggcaggacttttccgaactggggctgtgtgcctagaaatacgtacatgggagcgctcagctcaaagccccagggtttctgggactcgcgtgtccggggtcggggtcccaggtgggtacaggtgggagggcgaacctgcgggtagggtgggcccctccccgcgggctcagcatctgtgcgcctccagctcaggtgcgcgggaggaaggcagcggcctgccgcgcagagccctgcgcgcccgcgaggtggcgccatagccgcagcagcgcccgccggcccgggccgctccagataagagtgtgcggaaagcgcggcggggctgagacgcgaccaggacgcggggaggacggaccagcaggacagaccgaccgggggcccggcgggcggagggcagcgcagccacgtcccccctggatccgccgtcagccgggcccggggctttcgacatgccccccaggtgggtcctcgag

SEQ ID NO: 28 - DNA, 9254 bp, Homo Sapiens
tgggggaaactgaccccatgattcaattatctccacctgaccccacctttgacatgtgaggattattacaattcaaggtgagatttgagtggggacacaaccaaaccatatgagtggacatgcaatatgagtgagaaacaattctgtgattgtaacccagtaagatttttggatggctaacacagcataacctagagtatatggaggtgtgcatttccagctctttgacttccgggtacctagtaggattgcactttcctgcaccctttaagtaaggcatggccatgtgactaattttagccaataatatgtaaatacaataaaaagtgtcattcctaggagggagcttttaaagccaatgtgagttcaccatgctttctttcccctgccaaactgatgcgatgattgttgaagcatgtatcaagatgaaaccttcttcagactaggtttctaaatgagcacattaagcagagccccgtgaagttgaacatgtagtatgagcaaaatataaaatttatttttaagccactgaaattttaggattgtttgttatggcagcataacctaaaccatcctgactcatataaaaattggctcctagatatgggttagtgtaataacaacaataagcataacaacaataaaactaaacaatcatttagagggcgataactaagaacactgctatcagaagctgaagggatggtgatctgtttggtaaacatatcacctgtgataatgtagaaggcagatcatgaacctgatgaactaaagaaaaggattgtaaaacagagagtgagtagtgtgtgttggtggctgttggatgcattctgaaagttactacaagctattcaaagatgaactcagaaaaatttggcctgtttgcaatcaggaatgaaatggaatagagaaaacctataaatccagggatttacatcgttagaagaggcaattgtttcccagtcccgactggtaaaatataaaatcaagaaatacttttagcaagaaaggacctggaagaaactaagctttgaagtaaggatcaagtcacaaagtatgaacctactattaaaacctcaggataggaggccgaggaggacggatcacctgaggtcgggagttcgagacaagcctgaccaatatggagaaatcctgtcgctcctaaaaatacaaaattagccgggcgtggtggcgcatgcctgtaatcccagctactcaggaggctgaggcaggagaatcgcttgaacccgggaggtagaggttgcagtgagccgagactgtgccattgcactccaaccagggcaacaagagtgaaactccgtctcagaaaaaaaaaaaaaaggatcaattaagatcttacccagtatatactttcaactggacaaaatggctctgggaaaaggaagaaaggtctaactctcccatcaaaacccaataagcccaaagtgctcaaaatcaagtgaagagcaagagagtgagacggcaaaagagagacagaggagtcaacaggcaggagagcaggaaagcaaagagatatggcaaaccaaagaagtatgtctggaaaagaactttgtggctattgtcacatggaacacctcatatcagatagataagaagcctacctacacatattcaagacttaatgtcactctgcatctccccaacttttaaaagcttatttaaaagcatattttccaatgcctgctttagctgtggaaaaggaagactctccgagggcaaatccaggagtcatggaaaacaatgggcagggcagcttggtgctgtgactggatgggtctttaaggttgtttcccttgaataaagaatgagggaattccaccaggggaaggagagtagaccaaacatttggtgaacagaaagggagacagagtctttagtgttattccccaaatattcctggagagccctttgagacacctggtaggattatagtgatctaaagaggcatggccatgtgactgctttggccaatgatgtatgggcagaagtgatgtgtgccataagtggatgctctgacagccatgatgttccgagttccttccccacagtcaggatagctgtgaaaaggggtatcaacacgaggcctccttcagcctgagccctttagtgactacaatgagcagagctaccctgccaacctacaacggtcatgtagcagaaatgaccaactttcactggaataagccactgatatgttagggttgtttgttagggcagcataacactgcctttcctgacagaactgggagtgagagataaggctggagagagaaggagttggattgtgaaaagccccttctccaaggcataggaatcggaactctcctgattgtaaggaaaagccaatgaaggcttccaagcaggggcgttaacatgaacagatttgttatttttttggatgaaatatgctatttctcaacataaggagaagatcagcctactaaaccacatgaggcagagaggaacacacagaaccttaggcaaaagatatatatttatgcaaagtcctaagtcttgaaatttctaaatacaagagctctgaacggagttacagtcagaggatcaggcaagaaaatttcttctatgccacaagcgctatttcctctgcagataactaatactccacaagaaagtttgccagagtagagaaaatacaaaggaatgtaacacagacctgaggtcaatttccagctgcctgtgtgacctcaacaaagatacttaacctctctgggcctatttcctcacatgttaaatctggataataatatatgtctctcaagacagttgtggggagaaaacagcgtatttaaattgcttaggagaatgcctggcagataataagtgtttaatacatgaaactgatttttattactgttattaaaaaatatttagaacaccaactccctgaatacaacagaaaatgattcagggcaacagacagaggagaatgttctctccttgaggaagcaactggatcttgtcatcactgtatacctacctaccccaccccctccccagctcagtgcctggctcacagtaggctttcagttaccctctgcagatcagtgaaagctaggtgagtgcccggagtgaagaaaagttggcaggtttcccactgataccagctgctgttggtttctgaacactcaaagccgcaaataccttagggctgggggcaatgaacccaaggctgaattccaagttcagaagcagcgaagtctgaatttagaacctaggaacttaaactgctgcaggtccaacttcaagccccagttttagacagaggcttgggaaagatctgacttctaacccggttccccctcccctcctcccctcgatgcttctcacaggaaagtacacctggtcctgccaaatcgcactcttatatcctggcatcctatccaggctctgcgaggatggaaactgcgaggcaggggagggaagcgggctgtttggccaccacctccctagtgctgcaggcgaccctgtcacactaactcctggcagcccagtgaggtggacggcaccggccccacctgcagatgagggaaatgaagctcggaggagttccgtgatttgcttgcttcacactgtggtagcctggccacgaaagaaccaggattcccgacttcgggattctttccaccacacactttcgtccctaaggggtggggggcggggggagaataaaataaccgcggaaaaggaaccacttacatgtgtctagcgcttcctagaggctacccaggatatgcgcccaccacccggccgggagtgcagagatttgaagtccaggttctaccccgggctccgagtactactgcgtgactttatgcgagtgtccgccgccttctgggcttgttttcccggaagcaactcggcgcggatggagtgtgtgtgtgcgcgcgcgcgcgcgttatgttgtgcgtgttgtgttaagcgtgtgcgtgttgtccgggggcgggagggggagtagactaacaccggggttccccgagtttcggatcgcctacacgcttgttcccatctggaccctgttacccaccaattgcgcccactataaaaactgcccctccgaggcaaagctgtgaacccccgcgccctttcccccacggtcccggaggatgaagtggggtgcaacggagactcagctgagcgtccagtttcgggcaatacaaatctctcggcttctacgagcagccagacgaccccgcggaccgtcgctcctgaacttgaccgagatgcaaacttcggagtgttctcaacgtggggggccgactctcgggagaccgcccctaaacttaagtccccttaggctcgcccccacctgggacttcacagagccaccttaagggcggtattcccgcccccccggaagtgcgggggggtggcagcgtacttggattctcagcctccagccccgcgcggtggcggccgccggtggatgacttcgggccccacaagtggggaaacaacaaccacccctcgcccgcacccctggcccaaaacaactggccaggttccctggcctcccgggtccctgcatcccccgcatccccgtccgcagccgtgaacttgagcccccctccatcagaggttgcgagcgtccgcccgctcgcggcagccaccgtcactagacagtcaaaccccaagacgtcagcccacaatgcaccgggcgggccgggaaaaacggcccggggaggggaccggggaagagagggccgagaggcgtgcggcaggggggagggtaggagaaagaagggcccgactgtaggagggcagcggagcattacctcatcccgtgagcctccgcgggcccagagaagaatcttctagggtggagtctccatggtgacgggcgggcccgcccccctgagagcgacgcgagccaatgggaaggccttggggtgacatcatgggctatttttaggggttgactggtagcagataagtgttgagctcgggctggataagggctcagagttgcactgagtgtggctgaagcagcgaggcgggagtggaggtgcgcggagtcaggcagacagacagacacagccagccagccaggtcggcagtatagtccgaactgcaaatcttattttcttttcaccttctctctaactgcccagagctagcgcctgtggctcccgggctggtgtttcgggagtgtccagagagcctggtctccagccgcccccgggaggagagccctgctgcccaggcgctgttgacagcggcggaaagcagcggtacccacgcgcccgccgggggaagtcggcgagcggctgcagcagcaaagaactttcccggctgggaggaccggagacaagtggcagagtcccggagccaacttttgcaagcctttcctgcgtcttaggcttctccacggcggtaaagaccagaaggcggcggagagccacgcaagagaagaaggacgtgcgctcagcttcgctcgcaccggttgttgaacttgggcgagcgcgagccgcggctgccgggcgccccctccccctagcagcggaggaggggacaagtcgtcggagtccgggcggccaagacccgccgccggccggccactgcagggtccgcactgatccgctccgcggggagagccgctgctctgggaagtgagttcgcctgcggactccgaggaaccgctgcgcacgaagagcgctcagtgagtgaccgcgacttttcaaagccgggtagcgcgcgcgagtcgacaagtaagagtgcgggaggcatcttaattaaccctgcgctccctggagcgagctggtgaggagggcgcagcggggacgacagccagcgggtgcgtgcgctcttagagaaactttccctgtcaaaggctccggggggcgcgggtgtcccccgcttgccacagccctgttgcggccccgaaacttgtgcgcgcagcccaaactaacctcacgtgaagtgacggactgttctatgactgcaaagatggaaacgaccttctatgacgatgccctcaacgcctcgttcctcccgtccgagagcggaccttatggctacagtaaccccaagatcctgaaacagagcatgaccctgaacctggccgacccagtggggagcctgaagccgcacctccgcgccaagaactcggacctcctcacctcgcccgacgtggggctgctcaagctggcgtcgcccgagctggagcgcctgataatccagtccagcaacgggcacatcaccaccacgccgacccccacccagttcctgtgccccaagaacgtgacagatgagcaggagggcttcgccgagggcttcgtgcgcgccctggccgaactgcacagccagaacacgctgcccagcgtcacgtcggcggcgcagccggtcaacggggcaggcatggtggctcccgcggtagcctcggtggcagggggcagcggcagcggcggcttcagcgccagcctgcacagcgagccgccggtctacgcaaacctcagcaacttcaacccaggcgcgctgagcagcggcggcggggcgccctcctacggcgcggccggcctggcctttcccgcgcaaccccagcagcagcagcagccgccgcaccacctgccccagcagatgcccgtgcagcacccgcggctgcaggccctgaaggaggagcctcagacagtgcccgagatgcccggcgagacaccgcccctgtcccccatcgacatggagtcccaggagcggatcaaggcggagaggaagcgcatgaggaaccgcatcgctgcctccaagtgccgaaaaaggaagctggagagaatcgcccggctggaggaaaaagtgaaaaccttgaaagctcagaactcggagctggcgtccacggccaacatgctcagggaacaggtggcacagcttaaacagaaagtcatgaaccacgttaacagtgggtgccaactcatgctaacgcagcagttgcaaacattttgaagagagaccgtcgggggctgaggggcaacgaagaaaaaaaataacacagagagacagacttgagaacttgacaagttgcgacggagagaaaaaagaagtgtccgagaactaaagccaagggtatccaagttggactgggttgcgtcctgacggcgcccccagtgtgcacgagtgggaaggacttggcgcgccctcccttggcgtggagccagggagcggccgcctgcgggctgccccgctttgcggacgggctgtccccgcgcgaacggaacgttggacttttcgttaacattgaccaagaactgcatggacctaacattcgatctcattcagtattaaaggggggagggggagggggttacaaactgcaatagagactgtagattgcttctgtagtactccttaagaacacaaagcggggggagggttggggaggggcggcaggagggaggtttgtgagagcgaggctgagcctacagatgaactctttctggcctgccttcgttaactgtgtatgtacatatatatattttttaatttgatgaaagctgattactgtcaataaacagcttcatgcctttgtaagttatttcttgtttgtttgtttgggtatcctgcccagtgttgtttgtaaataagagatttggagcactctgagtttaccatttgtaataaagtatataatttttttatgttttgtttctgaaaattccagaaaggatatttaagaaaatacaataaactattggaaagtactcccctaacctcttttctgcatcatctgtagatactagctatctaggtggagttgaaagagttaagaatgtcgattaaaatcactctcagtgcttcttactattaagcagtaaaaactgttctctattagactttagaaataaatgtacctgatgtacctgatgctatggtcaggttatactcctcctcccccagctatctatatggaattgcttaccaaaggatagtgcgatgtttcaggaggctggaggaaggggggttgcagtggagagggacagcccactgagaagtcaaacatttcaaagtttggattgtatcaagtggcatgtgctgtgaccatttataatgttagtagaaattttacaataggtgcttattctcaaagcaggaattggtggcagattttacaaaagatgtatccttccaatttggaatcttctctttgacaattcctagataaaaagatggcctttgcttatgaatatttataacagcattcttgtcacaataaatgtattcaaataccaataacagatcttgaattgcttccctttactacttttttcttcccaagttatatactgaagtttttatttttagttgctgaggttaacattgctgcaatctgaagtgatttgaaaattaagaagcaaagaatttaggaagagtcaaactagaagttgtgatctgaatgaaacagtctcccaatttcattaattctttccctctttctccatctctatctctctctctactacctcacccccaaataaacccctatgcctatggaaactaacagtttagcattttgggtctgtctgtagcttatttcttaatttgtttctaaaataatcaaccttgtttaaatatagaataagtctcaaaagatagtaatctaatactatggaaaagattcacaagagaaaacatgaactagtactaactcaatgattacatgcgtaaatcaaacctcagctctggggaaatgggaaacttgaattctacctacagatataacttaggagatcaacaaggcagtgcttaacaagggaacaattttttgcttggttgcttttcataccaagagccagtgtgattatcaggcagcaaaagcaatttgatatccaggaatatttcacaaaccactaattgagtcagggctgtttgctcattagcagtgttctagtacccagtaggtctgggagtgctaatatcctgcctgtggctgtaaatccaaatacacaaagagtttctccttaggagtatatctaggagtggaagagattggacaggcttgttagcttcggatcctttgtaataacacttcttgaacaaagggttactgggagcagagcccagtttgccaaactgaatttgccgatgtcagcaacccggaaggtgagatgattttgaccatatgtagaaatagcagagggacaataaagcattttggggtggggctctgtggaagctaaacaagagccaactagaaaaaataagcaggctggggaattaattacctgcaaagg

SEQ ID NO: 29 - DNA, 8244 bp, Homo Sapiens
ttctaaatatattcaccatttcgacgggtcacaataattttcttggacgttaatttccggggacgtcaaaacacatcagtcccggcgggcttttccagacttacactatgtggcctggggccccagatgtgctttctcccaggctctggacagttttatacaccccctccaggtcccacagatttacaggccactaacccgggttccctaattttaaagacgaagcccttggtccgtggtggtcgcgctgaccaatttgcctggctccccaggatgtggacagtgccttttccacatttaggcattgtttccaaaacaagtggaactttcccgcataattttgaatattaactccagggtctcctaagcttactgtttcccgcacacgtccgccccattccgcgcccccccaccccacccccgcgccccttcccgttcacctcagcatgggacatttgctgttgggtcccgcaaatctattcacactaacctgggttccctaaactttacacgttgaatcccaagtccctcatgacactcagcagggctggaaggttggaaccctcagagtatgaaaattgcttcccataccttcccccaaattcggtcattacacccagagcatgttgaatccttttctgaatcataaacgacctgccctctgattgtctgagtttcataaaatggagggatttccccagtgattccccaaagctattgagaatgttgtgggtgtgtgagtcacaaagctttggggcattaacgtctatggctctatatgctgcctggccacgaatcaggtcccttaagatgtagacagtgccacccaggtccctggagcacactgagcagttaccaggaggtgctcaagtgtgacccaggattctccaggtccccccaaatcacacagggtctcccgggtccctctgggctacaccaagcacaaaaggaccccttgggcagagcctacttttatttctgttatgccaggtgttgctaacggccccagttcccaaacattccgagcactttctctgcatcacaacatattgactattaaacaattctctgggtcccaggagcttcataacaagaatcttgcttttctaaaattcaggcattggtctgaaaccccaacggccaggatcacactggacccttttcctggtcccccatacttggatgttctggacgctgccctccaggccctctaggaacattcagcattgccctcggatcacaggacagcactgatttcttgggctccaaacaacccactgagtcatctcaaagttaagcaatatttccttcaaacacactgcacactccctatcacaaaatctgaaaattcctaagtcctaagacctaggaattctgaatcccctttctttaaaatgtacatatggacccccaagtcctccaaggactctgagcaacttccctagatctttagattcaaaaacgattttcctggagcccccaaattgcggtattgtctcccagccttccaaagcaaattgagatttttttcccttcacaaaacaattgaggttttttttttttttaatactgatttatgagtctcctgactttatggtccctgccctgggtccccctacatttagaaaatgttccatggacccccaaagcacactaaaaaatgtccctgggtcccaagaaatcccaggcatggaaaaacctgcgacctataagtttcctagctactaactaggtttccagaaatttagatatcaaatctccattgggtaatttccatgtgtcccaaaaacttgaaatgtgtttcactggggctcccccaaatgcagacgacatccaggaaaatatatagtctttttcttatttaccaaaaataagctaatggaaatcatttaaaaattagcatagaaaaataatactgattttatatttttttattttttattttgctttccccaaatgtactgatcacactccaggctcccccaaaatctagacagtgctttcttccatctctgaagggtgttaaaacctttccctgaagccacagtaattatgaaggttattttttccccggctgctgccagcgtccaggccactaacttatattcttaagatgtgaaaattaatctcagcttccccctaacacaccaagaatgtgtttggatccccaaaatgtgttccttgctttcatctgccaattttacgtaatatggctctacggcaaaattcccaatttcatatggagaattttctttaactacccctcctcacaaattggtcccccaagctagctggcccctatttgagacctctttctctatgttcccaattgcatggagcaacttctctcatcccccaaacctgtaatctatttttctggagtctcgagtttagtcattaatcacggttcccacattaacggagtccccggggtcccctcctccaggacacccattcgctaagcccgcaaggcagaaagaactctgccttgcgttccccaaaatttgggcattgttcccggctcgccggccacccactgcagcttccccaaccccgcgcacagcgggcactggtttcgggcctctctgtctcctacgaagtccccagagcaactcggatttgggaaatttctctctagcgttgcccaaacacacttgggtcggccgcgcgccctcaggacgtggacagggagggcttccccgtgtccaggaaagcgaccgggcattgcccccagtctcccccaaatttgggcattgtccccgggtcttccaacggactgggcgttgctcccggacactgaggactggccccggggtctcgctcaccttcagcagcgtccaccgcctgccacagagcgttcgatcgctcgctgcctgagctcctggtgcgcccgcggacgcagcctccagcttcgcggtgagctccccgccgcgccgatcccctccgcctctgcgcccctgaccggctctcggcccgcatctgctgctgtcccgccggtgctggcgctcgtctccggctgccgccggggaggccggcgtggggcgcgggacacggctgcggacttgcggctggcggctgcgctcgctcctgctgggcgccccgaaatccgcgccactttcgtttgctcattgcaaagatctcattcgtggggaaagcggctggagggtcccaaagtggggcgggcagggggctggggcgagggacgcggaggagaggcgctcccgccgggcggtaaagtgcctctagcccgcgggcctaggactccgccgggaggcgcgcgcggagcgcgggcgaagtgattgatggcggagcgaggggggcgaggggggccaggggggcgcgagattccgccggcggccccttccccttggctaggcttaggcggcggggggctggcggggtgcgggattttgtgcgtggtttttgacttggtaaaaatcacagtgctttcttacatcgttcaaactctccaggagatggtttccccagacccccaaattatcgtggtggcccccgagaccgaactcgcgtctatgcaagtccaacgcactgaggacggggtaaccattatccagatattttgggtgggccgcaaaggcgagctacttagacgcaccccggtgagctcggccatgcaggtaggatttgagctgtgtttcccgccctgatcctctctcctctggcggccggagcctccgtaggctccaagcctggcccagattcggcccggcgcagccggccttccgcgcgtcccgcacctggcgggggctccggggctccggcgcggcaccggggggcgctcgggatctggctgaggctccaagcgccgcgtggccggctccttctgctggggcaggtggcggctgcgcgccccgcccgagcccaggggccccctcagccgcaacaaccagcaaggaccccccgactcagccccaagccacctgcatctgcactcagacggggcgcacccgcagtgcagcctcctggtggggcgctgggagcccgcctgcccctgcctgcccggagaccccagctcacgagcacaggccgcccgggcaccccagaaacccgggatggggcccctgaattctctagaacgggcattcagcatggccttggcgctctgcggctccctgccccccacccagcctcgcccccgcgcaccccccagcccctgcgaccgccgcccccccccccggggccccagggcccccagcccgcaccccccgccccgctcttggctcgggttgcgggggcgggccgggggcggggcgagggctccgcgggcgcccattggcgcgggcgcgaggccagcgaggcccgcgcgggccctgggccgcgggctggcgcgactataagagccgggcgtgggcgcccgcagttcgcctgctctccggcggagctgcgtgaggcccggccggccccggccccccccttccggccgcccccgcctcctggcccacgcctgcccgcgctctgcccaccagcgcctccatcgggcaaggcggccccgcgtcgacgccgcccgctgcctcgctgctgactcccgtcccgggcgccgtccgcggggtcgcgctccgccgggcctgcggattccccgccgcctcctcttcatctacctcaactccccccatccccgcttcgcccgaggaggcggttccccccgcaggcagtccggctcgcaggccgccggcgttgtcaccccccccgcgctccccctccagccctccccccggcgcgcagcctcgggccgctcccctttccgcgctgcgtcccggagcggccccggtgccgccaccgcctgtccccctcccgaggcccgggctcgcgacggcagagggctccgtcggcccaaaccgagctgggcgcccgcggtccgggtgcagcctccactccgccccccagtcaccgcctcccccggcccctcgacgtggcgcccttccctccgcttctctgtgctccccgcgcccctcttggcgtctggccccggcccccgctctttctcccgcaaccttcccttcgctccctcccgtcccccccagctcctagcctccgactccctccccccctcacgcccgccctctcgccttcgccgaaccaaagtggattaattacacgctttctgtttctctccgtgctgttctctcccgctgtgcgcctgcccgcctctcgctgtcctctctccccctcgccctctcttcggcccccccctttcacgttcactctgtctctcccactatctctgcccccctctatccttgatacaacagctgacctcatttcccgataccttttcccccccgaaaagtacaacatctggcccgccccagcccgaagacagcccgtcctccctggacaatcagacgaattctccccccccccccaaaaaaaagccatccccccgctctgccccgtcgcacattcggcccccgcgactcggccagagcggcgctggcagaggagtgtccggcaggagggccaacgcccgctgttcggtttgcgacacgcagcagggaggtgggcggcagcgtcgccggcttccaggtaagcggcgtgtgcgggccgggccggggccggggctggggcggcgcgggcttgcgccggacgcccggcccttcctccgcccgctcccggcccggggcctgcggggctcggcggggcggctgagcccgggggggaggaggaggaggaggaggaggacggacggctgcgggtcccgttccctgcgcggagccccgcgctcaccctggcggcggagctgggggtggggtgggggcgtcgggaagggccgagggaggtgtgaggtgtctgcaggggcgacttcccggtcggtctgtgggtgcagggggtgccgcctcacatgtgtgattcgtgccttgcgggccctggcctccggggtgctgggtaacgaggaggggcgcggagccgcagaagcccaccctggtatgttgacgcggtgccagcgagaccgcgagaggaagacgggggtgggcggggccaggatggagaggggccgagttggcaggagtcatggcagacgccacattcgcgacatctcccccacaccccctctggctctgtccgcaacatttccaaacaggagtcccgggagagggggagaggggctgctggtctgaggctaagaagggcagagccttcgacccggagagaggccgcggcccctgcccagtgggcagcgtggaagtttccatacaaggaggtgggaaggagacccccccccccttcactgccctgtgcagagatgagccgggggtgcaggatgggagcccatggcacttcgctacgggatggtccagggctcccggttgggggtgcaggagagaagagactggctgggaggagggagagggcgggagcaaaggcgcgggggagtggtcagcagggagaggggtggggggtagggtggagcccgggctgggaggagtcggctcacacataaaagctgaggcactgaccagcctgcaaactggacattagcttctcctgtgaaagagacttccagcttcctcctcctcctcttcctcctcctcctcctgccccagcgagccttctgctgagctgtaggtaaccagggctgtggagtgaggacccccgctgccatcccactccagcctgaggcagggcagcagggggcacggcccacgcctgggcctcgggccctgcagccgccagcccgctgcctctcggacagcacccccctcccctcttttcctctgcccctgcccccacctggtctctgctccctcacctgctccttccctttctgttccttcccttcggccccctccttgcccagctcagggcttttcctgggccctcacctgctccgcaccgctgcatgcttcctgtcctgctttctgccggtcccctgacccggacctccaagttcagagtggtggggcttgttgcggaagcgcggcgagggctagagtggccagctggcggagtgtgctcttagaatttggaagggggtggcagagggggcggtgagaggactggccagggtccagtcaaggagatgaccaaggaggctttcagatcctcggcgcagctgcccactagtctttagagagggcatgcaaagttgtgcttctgtcccactgcctgctcagtcgctcacataatttattgcatcaaaaactcccctgggtctgcggagcgaaggctggggctgcccgcctggagggttccaccttctgcaggggcagggccaacttgctgtggtggctcccggcctcccacccccgagtgggttaacccggccctgtggccctgcagcctgtggagggggtgtgtcctaagactggcctccccttccagattgtagtctggggaacctggtgtcggacttcccaggtggcctgagctggtctctccagctcccacggggagagtttggtagcgcaaatagggagatgttctggaggcccctggccttactggttcgatttgaggcctggaaaggaggctctgggcgtgtgtgtgtgtgtttgggggtacccaaggcagactggagttggagaactgggtgactgggaaaacaaggtttctagagcatgggtggcgtggttgtgttaaccattggagtccttgacccaggcctggctcagctgcagactggaaaggtggaaaagccagggggaggggcggggctggcccagcaggactggcctgctgctttgagggcgatggtcctcctggaccccccctgctcagctgggggttgtggggaggaagggactggtcctcctggatgcacatgctctgtaggggtggggctgtctgccatcttggctggcgctggaggcctgagaagtggcgatgtgacgctgggctggccctgcccccatggtgtcataggacggaggccaggtcgggtgtccagcctgggcccctgcagctgtggatgccgctgagctcctgcaataatgaccgtggagatggtcacccctcgtgtaaaattactagtgcttcttgcaaatggaaggaactgggccttttctgtgtgcttctggacgcttcattctgcacatggccctgcgccctcacctcggcattatgacctgtgtgttacttttgtaataaaaataatgtttataggaaagccgtgctttcaattttcaactgaatttgtaggttggcaaatttggtttgggaggggcacctctggcctggggcttggcctggctgccccgctcacgccacttctctcccgcccccaga

SEQ ID NO: 30 - DNA, 16842 bp, Homo Sapiens
cctcccaaagtgctgggattacaggcgtgagccactgcacctggcctgttatttatgtatttatttttttttgagacaagttcttgctatgttgcccaggctggcctcaaactcctaggctcaagagatcctcccaaagttctgggattacaggtgtgagccactgtgcataaccctgaagtggttaattttaataatacatttactttagcctaacatatccaaaattacatcatttcaacatgcaatcattattaaaattattaatgagatattttattttatttttatttatttatttttttgagacggagtctcgctctgtctcccaggctggagtgcggtggcgcgatcttggttcactgcaagctccgcctcctgggttcacgcctttctcctgtctcagcctcccgagtagctgggattacaggtgcccgccaccacgcccagctaatttttgtatttttagtagagaccaggtttcaccacgttggccaggatggtctcgaactcctgacctcgtgatcagcccaccttggcctcctaaagtgctgggattacaggcgtgagccactgtgtctggccagtgagatattttatttgtgccctttttttttttttttgagaccgagtctcactgtgttgcccaggctgcagtgcagtggcacaatcttggctcactgcaacctctgcctcccaggttcaagcgattctcttacctcagcctcctgagtagctgggattacaggcgggcgccacgacacctggctagtttttgtatttttagtagagacgggggttttaccatgttgcccaggctggtcttgaactcttgacctcaggtgatcacctgccttggccccccaaagtgctgggattacaggcaaaagccgccataccaggcccatttttttttctttcgagacggagtctcattgttgcccaaggtggagtgcaatggcaagatctcagctccctgcaacctctgcctcctgggttcaagcgatcctcctgcctcagcctcccaagtagctgagattacgggcgcccgccaccacgcctggctaatttttgtatttttagtagagacagggttttaccacgttggccagactggtctcaaactcctgacctcgggtgatccatccgcctcggcctcccaaagtgctgggattacaggtgtgaactaccgtgcctggcaggcccatttttaatttttctaactttggaaattcagtgtgtagggcaggcatggtgcctcatgcctgtaatcccagaactttgggaggccgaggcaggtggatcacctgaggttaggagttcgggaccagcctgaacaatatggtgaaaccctgtctctattgaaaatccaaaaattatccagccatggtggtgtatgcctgtagtcccagctactccagaggctgagacaggagaattgcttgaatctgggaagcagaggttgcagtgaaccaagatcatgccattgcactccagcccgggcaacagagcgagactccgtctcaaaaaaaaaaaaagagagtcagtgtggagggaagtgtctctgttgggtccgggtgctctgtgggactctgaggaaaagctcgcaccaggtagatgctgttctgtccccatgggtaaaggacaccccaacaaaccgaggagcaaaatgtcctcgtatgccctcttcgcgcagacctgccaggaagagcacaagaagaaacacccggactcttctgtcaatttcgtggaattctccaagaagtgtttggagagatggaagaccacgtctgcaaaggagaagtgaagtttgaagagaaggcaaaaagtgacaaagctcgctgtgacagggagattaaaaattacattcctccgaaatgtaagaaagggtaagaaaggaaagaaaaaggatcgcaatgctcctagaaggccaccatctgccttcttcctgttttgctctgaacatcgcccaaagatcaaaagtggacacccaggcctatttgtcgtggaaactgcaaagaaactgggtgaaatgtggtctgggcagtcagccaaagataaacaaccatatgagcagaaagcagttaagctacaggagagatatgaaaagggtattgctgcatatcgtgctaagggcaaaagtgaagcaggaaagaagggctcaaagaagaacaaaccagaagatgaggaggaggaggaggagaaagaagatgaagatgaggaggaagagggtgaagatgaagaataaatggctatcctttaatgatgcctgtgcagtgggcttgttttgctaagaatgtgaattctagtacagctcagtattagcttcagtataaaactgtacaaattttcgtatagctcataagattctctgtacagaaaatacttttcttttcttttcttttttttgagacagagtttcgctcttgttgcctaggctggagtgcaatggcgtgatctcggctcaccgcaacctccgcctcccgggtcctggttcaagcagttctcctgcctcagcctcctgagtagctgggattacaggcacatgccaccacgctcagctaatttttgtatttttagtagagatggggtttcaccatgttggccaggctgctttcaaactcctgacctcgtgatccgcctgcttcggcctcccaaaatactgggattacaggtgtgagccaccgcaccctgcctaatgtccctaaatatttaatggtttttaaaaaatttattgtgtatggcagcacagcacacttgtaggaattagtatcaacagtacatcttgcgttttttaagatgctgcattttttaacattttgtaataaaattatgcgtatcaaaaaaacaaagaaattccgtgtgtagttcacactcacagcacatctccgtccaggcacttgagagaatgactaggaggggttcttggaggaggtggtctttgaacggagaatccatcttcaaggattctgtctgtaatggtcaccaagtatttcctgagtcacttccatgtgtcctgcagttctctgaaggggcgtgggacctaccgatgccaattatccagcattatctccagattccaagaagttggggtgtgagccagcaatcagtacagaaaagagataccaaaataagtttgagttggggagtgttccttcaacttcagttttctggaagagatcttttttttttttttgagacagagtttcgctcttattgcccaagctggagtgcagtggcacgatctcggctcaccgcaacctcctcctcccgggttcaagcgattctcctccctcagccttctgagtagctgggattacagacatgcacctgtaatttctactaaaaatacaaaaattagccgggcgtggtggcgcacgcctgtaatctcagctactggggaggctgaggcaggagaatcgcttgaaaccaggaggcggagattgtaccaagatagtttgttccagctaaacaacctggcgctagtgcaggaaaaggtggaaggcacggggctagcacaggagggttcaatattttcaaccttatcaagccatattttggcaactcttgtttttcacgagaagcccccgctgggcttgtcccagcgctgtcctgaggcttcccccatgagttccgatagggcagaggccgccctgagcgtttctctttcccctggtccaagagtggctcaaaagaaggatttttgactggaattggccactttgtgttactttttgacccttgacctcgccccaaagggggatgcgggggaggggctctggtaggggtggccccgctccttccaggtccgcaagcccaggttcccgcccaccgggctcagcccaccctgcggccgttcagggaggccgttggcacccgtgacctacgacccccttcccgagccccaccgaggtcacagccgtggcctcgtctccccatgcctgcttcccgccccctgcccgtgacgggcgtctccgaggaccaatgagcgcgctgtatccacccctcgggcggggccaagcgccgaccaatcgccgctcgggcgcccggccgggtccaaacgctccaatcgtcagcggcggcggggcgggcagagggccggggatggcaggttcaaccaacgggtgggcacgtcgtcctcgcgaggaggcgtgccctgcggccgggcgtgcggtgtccgcggcggcgcagggagggggagggaggtaaacaagatggcggcggcgtgtcgggcgcggaagggggaggcggcccggggcgcccgcgagtgaggcgcggggcggcgaagggagcgcgggtggcggcacttgctgccgcggccttggatgggctgggcccccctcgccgctccgcctcctccacacgcgcggcggccgcggcgagggggacgcgccgcccggggcccggcaccttcgggaaccccccggcccggagcctgcggcctgcgccgcctcggccgccgggagccccgtggagcccccgccgccgcgccgccccgcggaccggacgctgagggcactcggggcggggcgcgcgctcgggcagacgtttgcggggaggggggcgcctgccgggccccggcgaccaccttgggggtcgcgggccggctcggggggcgcccagtgcgggccctcgcgggcgccgggcagcgaccagccctgagcggagctgttggccgcggcgggaggcctcccggacgcccccagccccccgaacgctcgcccgggccggcgggagtcggcgccccccgggaggtccgctcggtcgtccgcggcggagcgtttgctcctgggacaggcggtgggaccggggcgtcgccggagacgcccccagcgaagttgggctctccaggtgtgggggtcccggggggtagcgacgtcgcggacccggcctgtgggatgggcggcccggagaagactgcgctcggccgtgttcatacttgtccgtgggcctgaggtccccggaggatgacctagcactgaaaagccccggccggcctccccagggtccccgaggacgaagttgaccctgaccgggccgtctcccagttctgaggcccgggtcccactggaactcgcgtctgagccgccgtcccggacccccggtgcccgccggtccgcagaccctgcaccgggcttggactcgcagccgggactgacgtgtagaacaatcgtttctgttggaagaagggtttttcccttccttttggggtttttgttgccttttttttttcttttttctttgtaaaattttggagaagggaagtcggaacacaaggaaggaccgctcacccgcggactcagggctggcggcgggactccaggaccctgggtccagcatggaggtggtggacccgcagcagctgggcatgttcacggagggcgagctgatgtcggtgggtatggacacgttcatccaccgcatcgactccaccgaggtcatctaccagccgcgccgcaagcgggccaagctcatcggcaagtacctgatgggggacctgctgggggaaggctcttacggcaaggtgaaggaggtgctggactcggagacgctgtgcaggagggccgtcaagatcctcaagaagaagaagttgcgaaggatccccaacggggaggccaacgtgaagaagtaagtatggcttgctggggtcggggccgggccgggccagtcacggtgctgatggttctgtcttccttccttctctcctccctccctcccttacttcctcttaacaccctgagctggacccgtctggcgcctgtgtcctccgtgccagggagagcgtggttgggggcctgcgttacggactttcactcaggcaaggccagttgtcgcagcggggcgtgcgtttgcatgggctcttggactccagttaaaatgccctggtagcgaaaccctcctgagaagggagcggcccccaatcccctaagactagccccttggctcccccagctgtccaaggagcagaggcgcccagtggaatcagcctgtgtttgtttgggccccgagagtttgtgtgcggccgccaacacgttttctgcgcagtgtgtggccgttaccggggccaggcgaaatgtgatttgtttatcctgtcagaggggaaccctgggctgccaaaaataactgtttgcaccggcttatcagtcagcaggagggaaacgtagcctttcctcatttgccagggatgtgacgctggaagcatccctggcccccggggctggaagccctgcccgagggggactgtgcctccctcccgaattgcatccggaagaccttacttttccaactgacttcttcaggcacggggctgccgctgggcatcccggacgcctctgcatctgtgcgcggagaagctcctacctagggcagcactggccggcctgagcctctcccagctggtgggggtggccgggggtgtccctgccttatcgcagccagacacgctgcacctgccgccgcctggcgggccctgcccaggccctgctcctttcccagccttcttaactttcaaaactttgcctcctgtttccaagaaaggaccttatctgctgggctaggcctcgagggactggcaaggacaccctgcgcagggcaccatgaccttggaaggaggtccggggaggggctgctgcggtgtctgctctcaccttcctcctgctcaggggccctggggctcctgccgtgtctgctctcacctctctcctgctcaggggccctggggctcacgtacatttttttttttttttttttgagacggagtctcgctctgttccccaggctggagtgcagtggcgcgaactgggctcactgcaagctccgcctcccgggttcatgccattctcctgcctcagcctcccgagtagctgggactacaggcacccgccaccacgcccggccaattttttgtatttttcagtagagacggggtttcaccgtgttagccaggatggtctcaatctcctgacctcgtgatccgcccgcctcggcctcccaaagtgctggtactacaggcgtgagtcaacgcgtgcggcctttttttttttttttttttttttttttgagacggagtttcactcttgttgctcaggctggagtgcagtggagtggtcttggctcactgcaatctccgccccctgggttcaagtgattctcgtgcctcagcctcccgagtagctgggattacaggtgcctgccacagtgcccagctaattttttttttttttttttagtagagacggggtttcaccatcttggccaggttggtcttgaacttctgacctcgtgatccacctgcctcagcctcccaaagtgctgggattaaaggcgtgagccaccgcgcccggccagcacgcttcttaatcagcatgcaggctgtgacatgcggaaaccaggggcacaggctctgaagtttgtactctggagctggagcagtcagggttaaatgggagcggctgggaagggtgtgtttccacgaggcctttctgatgtctcagtgcccagtctggacccgggtagaaggtgtggccagtgccttgagtcagtggagcagttgcctgtgcctggtctctgtgagatgggttggtcaggggctaggcagagcctgtgcctggtctctgtgagatgggttggtcaggggctaggcagagcctgtgctgggggtagcaggtgccctctaaaggggccagtgacagtctctctcccagcagtgagaaacccacgcttaggggccgggcgcggtggctcacgcctgtaatcccagcactttgggaggctgaggtgggtggatcgcctgaggtcaggagttcgagaccagcctggccaacatggtgaaaccccatctctactaaaaatacaaaagttagccgagtgtggtggcgtgtgcctgtaatcccagctactcgggaggctgaggcagaacattgctggagcctgggaggcggagcttgcggtgacccgagatcgcaccattgcgctccagcctgggcgacacagcgagactctgtctcaaaaataaataaataaataaataaataaataaataaataaataaatctggcttgagttttgacaaatgtatatgcagggtcaatgggaagacagacgctggagggtggaagcctgactgtgagagtgagccccctgctttcctgaacagtcagtggaggaggtcctgggagctcaggtgagcacctgaacggtagggcagagcctgagggtcttggtggagacaggcaagaaggttgcaggaacctagtctggcccagtgcctgggagaacgggagggaacacggaggcagggaggcagaggggttggcaggacctggactggactgtgcgtcgcagctacccacagcttgaccccactgccttgaagtgagtgatgcaccctcactagtgttcagcgtccaatttcatcctggccctgagtgtgtaacggctttgcccttgcggggccccctgggatgaggggtgagccctgtcccttcctggtcactgtctgccatcaggagctgccccgcttacagctgtgattcaggagccactgcatttcctccagccccctgggtgctgccagggggtcctcctattctgggagctggtgtgttctgactggaggctgccatgtgcagagtgctgtcaaggagaaggggtgtccactgcccagccctgaggcccaaggccttggccagccttgctgccagcgctgcagggaaaaagcctcctttgtgtgtgggaagtttaataaactccgctcagattgtgtctcgcagcgagtgtctggaaccttccagacaagcctcaggcgtccggtcctccagttggtgtggaaagcgtgggcgatcaccaaggggggtgggttggggcagatggagccggcgtgagtcccgtctcttcccttccttcccagaaaggcagccctggagtccatgccttgtcccgctctcaccggcaaaaagtataatcttattagaaataggaaagttccaaaaagcatcaatgagttaaaaagagggctgggcatgttcggtcatgcctgtaatcccagcactttgggaggccaaggcgggtggatcacccgaggttgggagttagcctgaccaacatggtgaaaccctgtctctactaaaaatacaaaattagctgagtgtggtggcgcacgcctgtaatcccagctactctggaggctgaggcaggagaatcacttgaacccgggaagcagaggttgcggtgagccaagaccatgccattgcactccagcctgggtaacaagagtgaaactccgtctcgaaaaaaaaaagggctggggccgggcgtggtggctcacgcctgtaatcccagcactttgggaggccgaggcggtttgatcacaaggtcagaagtttgagaccagcgtggccaacatggtgaaaccctctctctactaaaaatagaaaaactagccaggtgtggtggcacatgccaataatcccagctacttcatctgaggtcaggagttcaagaccagcctggccaatatggcgaaactccgtctctactacaaatacaaaaattagccaggcgtggtggcgcgcgcctgtagtccagctactggggaagctgaagcaaggagaatcgcttgaacctgggaggcggaggttgcggtgagccgagatcgcatcattgcattccaggctgggcaagcctaggagagaagagcgaaattgtgtctcaaaaaaacaattaattaaaataaaatcagtgccataggctgtttctggtaggcagtgggttcctagggtggagcagggaagggctggaaagggtcgcctgtgcccagcccgactccccgtgcttctcgggggacagcacggctagctgctgctgcggagcccacagtggggttctgggggggggggtgcaggcagaaggccgccatgcctccctccccctttccaccccagtgagagtgggctcgaaggcagggagtctgcccgccttgtggagcctccgcagaggcacccagggctgccgtgagcgcacagcctggcggtgtcccacggccctgccctttcctgtcacttccacctgttgcaaaacactgtgctttcgtatcttttctttctacctgtttggaaatgtgaaaatcactgctgccgtaggaaacgggcccagatccgggctgtggctctcccatccgcaccgcccccgcggtgtccagccaggaggtgggaggtgggcggcactcagtgtgcctggttgcggcgatgattggcagatgcttggacctatggtaaagaggattttcgcgagctgggagtcagtcctggactttgtaggtctttacatcccaggcggcctttatggggttccagcatctgctgaggcccctgcgccagccatgtgaggcctgggtgtcctcgaggcctctgtttgtgcccctctctgggcagcgggagggagagctctgagacccagagggagctcaggggctgggcagccgcagaacagcgggggtaatgggtccactgggggttctgggctgtgcacacagtgggcttccggtgcccagccagctggggcaggcctggaatgttggttcctctctcaggatctggggcgctgctgtagctgtcggggaatcagtgaggcggctggacggcccgtatatcccacaaacgccaccgtattgctcaaactggactcaattttcttaacacctttttttttttttttttttttttttttggagacagggtctcactgtatcgccgaggctggagtgcagtggcgcaatcatagctctgggctcaggtgaccctcctgcccccaaggtagctgggactgcagatgtgcaccaccacacccgactagttttttgtagagatggggtttcgccatgttgtccaggctggtctcaaactcctagactcaagctatccgcctgcctgggcctcccagagtgctgggattacaggtatgagccactgcttcgccacgttcacctttatttacttatttatttatttttgagacggagtctcgctctgtcccccaggctggagtgctgtggcacgatcttggctcactgcaagctccgcttcagcctcccaagtaagctggaactacaggtgcctgccaccaagcctggctaattttgtttttgtatttttagtagagacggggtttcaccgtgttagccagtatggtctcgatctcctgaccttgtgatccgcccgcctcggcctcccaaagtcctgggattacaggcttgagtcactgtgcccggcccacctttttattttttattttatagagacaagggcttgctgtgttgcccaggctggtcttgaacccctgaccttaagtaatcctctctggcctcccaaagtgctgggattacaggtgtaagccatagtactgggcctaaagttcaccttttttttttttttttttttttttgagatggagtctcgctctgtcacccaggctggagtgcagtggcgtgatcttggctcactgcaagctctgcctcccgggttcacaccattctcctgcctcagcctcccgaatagctgggactacaggcgcctgccaccatgcccggctaatttttttgtatttttagtagagatggggtttcactgtgttagccaggatggtctcgatctcctgacctcgtgatctgcctgcctcggcctcccaaagtgctggggttacaggtgtgagccaccgcacccggcaaagttcacctttttaaagtgtgtaattcagtggcatatagtacattgacagagttgcacaactatcacctctatcagcttccagaacattcttgttaccccagaaggaaaccccgtctctgtcagccatcactccccattccctccccagtcccggcacccacgcattcccttcctgcctctggattggcctgtcctgaacatttcacacgagtggtgtcacacaccgcgtggccttttgcgtccggcttgtctcacggagtgtgctgtcctcaaggggcatccgcgccgtggcctgggtccgaacctctctgctgttcacggctgcgtcactttccagtgtgtggagggccacgctgcgtttgactgctcatctgtggctggacacttgggctgctcccgcctctgcctgtgaattgtggctgctttggtgcacgtgtgctcagccggcgtccctctagaatccttgagggccttgtttcagccacatcaggagggattcagggaccagggcacgcgggtctggagctgggtgttcctgggtctccatgtgcctcccagtcctgctctgagccgtgggaggccggggcgagggccaggcccatctcttccctgtatgatctgtttctaggcagacggaggctcctagccccacctctctgtgagcttgagtggcgtttatgactctccttcctatttcctgtcctgctaatcaacaagtcagctaaacagtccatgctgcctgggcaagcccagtaggcccctaacgtggcacctcggagcggctggcgatgccccaagagccgggcttccccctcctggaggctcttcctgttcctcgccaagctcttaggtttcgctgggcctcctcttctgctctttttctggctggagacgtcagaggaagcctggcgatctagagaagctgatgtgcacccatcatcccggaggtgactgccaccaggcgggggtggctccacccccactcctcccctggcataaatcgggggacgcacgtgcctgcgcagaatgccttggtcccttttaattaaacagacaacccagtgtcccttggtctatgctgacctgctcaggagtgcctgggctcttccacgtttcagctgctgtgtgtcctgctgctgtgaagtgtccccgttgaggtggaggcagggcagggcgccttcggtgagggcgagtcctcctgtgcccgtttccccatctgtagaatgatggctcatggaggagacatggtgtcggcaggtggtggccggcgcagggaggtttccaggagggagtcctccaccctcatttgcttttagggccgtgcagcctcccgagcggcccccacgaggctctgaggctgcatgcaggttgagctcctggcctcactgcccctcctcagggttaggactgtgctggagcctgggtgggtgtggggtggtccctgcacaggcagcaggaggtgggccagagcggtgctggacctgaaggcccgtggctccctcagctccactgaggaggctggaatagtgtcctgggccaccttccctgccggtagccggctcctgctgagggagggggtgctttcgcctcctggtggagcatcaggctcttggggcctgtgcgtccgagcatctggcctctgctgtctgaaaacagcaccttccccgccccccggccaccgcatctcctctgaatagaaggcaagtcttgcctcccaggaatggcctgtgaccttcatcagcgggggaggttaggggcacacagagccctggggaacaaggggatctggggctgagccgggcctctcgggcccaccccgagctctcctgagcagcctggcaggcaggaaggcgctgggccccggggcctttgccgagcccagcctcaccctcagcgtccccctcaatgccctgggtgcctgccaggctgtggacacaggccctggccagttctataaataaccttgccgggccctgctgggaattggtgccaccaccacatagcccagagagaacggaaacacagggcttctcagcgagcagaccaggcctgcggtgaccagtggaagtgggggacgctttcagggctgggcagcccgacagggcaccgggcacagccaggggccggaaccagttgctcactggctccgcttctgggggactgtgtccctctgtgccccgtccccatcacaccttgctttcccttcatcctgctctcctagcccctccccagactggcggccccttgtccaggcccagccccagcacagcctgcagccctggcagagctcaggccttggccttctgaggttgccctgagggcagtgagcaatgagccctgggactggtgcactgggagggaaaggtgagccaaggcttcctgcaagaggcagccctgagctgggggtggggaaggctgggtcgtgggatacccctgacaccccaagttttttttttgagatggagtcttgctctgtcacccaggctggagtgcagtggtgagatctcgactctctgcaacctccgcctcccaggttcaagcgattctcctgcctcagcctcctgagtagctgggattacaggcgcccatcaccacgcccggctaatttttgtatttttagtagagacaaggtttcaccatgttggccaggctggtttcgaactcctgacctcaggtgatccacctcggcctcccatagtgtcgggattacaggcgtgagtcaccgcgcctggccccccagctgttttttatgctccatgcttgggcttcctgttaagaattaaaaaagaaaaaaaaaactatggagatggaatttacatactgtacaactcattcgttcacagtgtacaattcagtggcattaagtacattcacacggctgtgcaaccactacttctaattccagaacgttcggtcaccccaaaagcaagccccattcccattgtgtcactctccatcccctccaccagctcctggccactctgaatccacttcctggctctggattggcttgtcctggatattgcatagaaatgggatcctgtcggccgggcgcggtgactcacgagagcaagagatccagaccatcctggccaacatggtgaaaccccatctctactaaaaatacaaaaattagctgggcgtggttgcgggcacctgtagtcccagcgactcaggggctgagtcaggagaaatcgcttgaacccgggaggcagaggttgcagtgagctgagatcatgccattgcactctggcctggcgacagagtgagactccgtctccaaaaaaaaaaaaacaagaaatgggatcctgtcatcccagcgttttccgaggccgaggtgggcagatgacttgagcctagtagttcaaacgagaccagcctgggcagcacggtgaaactgtctctactaaaatacaaaaattagctgggcatggtagcacacgtctgtagtcccagctacttgcggggctgagatgggaggatcgcttgagcctgggaggtgcactccagcctgggcgacagggaaaccctgtctcaaaaaaaaaaaaaaaagtgcatcacacactgtgtgtcctttagtgtctcactgtgacatcctcaaggtgcagctaggctgtggctcgagtcagagcctcactggtttttgtggctgagtcttgttgagtgcgtggatgggctgtgctgatcctcgtctgtggaagggcccctgggtggttccacatctcggctgctgtgcgtcctgctgctgtgagcatctcgtgctccgtttctgcgtggcgtgtactgttcctcagggtgtgtacctgggagtggagctgctggctcacagggtaacagacctttggagaagctgcagacgcttccacgcccacccactgggtgtgaggaccttgctcctcgtcatttttgtttttgtttaattttttcttttatgagacagggtcttattctgttgtccaggctggagtgcagtagcacgatcacaggtaactacaggctcaagtgatcctcccacctgagcctcccgagtagctaggacttgaggcacgtacctccacacctggctaatttttgtatttttagtagagacagggtttcgccgtgttgctcaggctggtctcgaactcctgagctcaggtgatccacccgcctcggcctcctatagtgctgggagaaatgaagtgtctgcgacagggcggcagctgcagagggggctgtgctctctggcctgttgtgccccacccttgtgacaggcaggtgggcgtggccaactgggcggcagctgcagagggggcagtgacaggcgggtgggtgtggcaggaccccacaatgtctctttctgtggcgtctccttcttcgcctgccccttcctatgggccatccttccagctcacctgcggcccaccctccaaggagtgggaccctcggagttgggagcccttggctgcgtgggactgtactgtgtgacggagccatcaccagggctccaactcaccctggctcctgccacagtctgggctccatctgtgctaccattgcagtagtctggtttctaggaagcaaaactgttactgagttacaaagctcaattaagagtgtcctttgggaggccgaggcgggcggatcacaaggtcaggagatcgagaccatcctggccaacatggtgaaaccctgtctgtactaaaatacaaaaaaattagccggctgtggtgacacgtgcctgtagtcccagctactcgggaggctgaggcagggaaatcacttgaacctgggaggcagaggttgcagtgagctgagatcgggccaccgtgctccagcctagggacagagcaagactctgtctcagaaaaaaaaaaaagtgtcctaactgtgtcctccaaagccctcgccggccgatgacagactagagggcgctgtgctcccaccccctaccgccctgagcctggacgcgtggcccctgcagggccctttcccacagcactgtgaactcacagcttctctctagggaagggaggaggtacgccacttccacagggagatggggaggccgactccagggatccaggccatcatcctgacgttgggtcggctgatacacccctgtcctctctgtcccagg

SEQ ID NO: 31 - DNA, 1157 bp, Homo Sapiens
ggatcctgctccctctgaaggctccagggaagagtgtcctctgctccctccgaaggctccagggaagggtctgtcctcttaggcttctggtggcttgcaggtgcagccctccaatcctcctccccaagcggcctgctgcctataaggacacgagtcatactggatgaggggcccactaattgatggcttctgtaaagtccccatctccaaataaggtcacattgtgaggtactgggagttaggactccaacatagcttctctggtggacacaattcaactcctaataacgtccacacaaccccaagcagggcctggcaccctgtgtgctctctggagagcggctgagtcaggctctggcagtgtctaggccatcggtgactgcagcccctggacggcatcgcccaccacaggccctggaggctgcccccacggccccctgacagggtctctgctggtctgggggtccctgactaggggagcggccccaggaggggagagactcgcgctccgggctcagcgtagccgccccgagcaggaccgggattctcactaagcgggcgccgtcctacgacccccgcgcgctttcaggaccactcgggcacgtggcaggtcgcttgcacgcccgcggactatccctgtgacaggaaaaggtacgggccatttggcaaactaaggcacagagcctcaggcggaagctgggaaggcgccgcccggcttgtaccggccgaagggccatccgggtcaggcgcacagggcagcggcgctgccggaggaccagggccggcgtgccggcgtccagcgaggatgcgcagactgcctcaggcccggcgccgccgcactgggcatgcgccgacccggtcgggcgggaacaccccgccccgcccgggctccgccccagctccgcccccgcgcgccccggccccgcccccgcgcgctctcttgcttttctcaggtcctcggctccgccccgctctagaccccgccccacgccgccatccccgtgcccctcggccccgcccccgcgccccggatatgctgggacagcccgcgcccctagaacgctttgcgtcccgacgcccgcaggtcctcgcggtgcgcaccgtttgcgacttggtgagtgtctgggtcgcctcgctcccggaagagtgcggagctc

SEQ ID NO: 32 - DNA, 8093 bp, Homo Sapiens
ccatggaaggaaatgagatcagctagcgagctgacacagaacaaggcagtctaaaacaaatttttttaaaaatacgaagaacagatattgaagggaagaggtgcctgcaaagactaagaaagcacacctggagatggtatctcctcaaagctaaagtcatcaagtgttcaagtgtttcaaggagggtaagactattaacaaggacttagcatagtagagcaatttgagtggcaatacgggacactgggaatacaaatctgtcaagaaaactagtaggaatgagctataggacagtaactggtaaggacctaataattttttttttaatgtacgtattttaactatattcactgctacaacaggaccagtaacaactatatttatttaaaaaaaaaaagactgccatgcagttacagaattacttaatacagaaaacagtaaaatacacttttttctttttctttttttttttttttttttacaaacaagactagcttatagcaaattctctatagctaagggtcaatttaaaatccttggcttatatctccccctcactcaatgactacatgatgcaaactaattttattaacaccttaagcaaaacatactggaatttcacaaaatgtacaagatttcaatatttaaggaactggggttagaaagcagaagtggctttcaggtcttccagtctttctctcaagtaataaagctctgctgtgaatattcaaagctattgggaaattaccggtagatttttctgtttttttttttcggttttccactatgttgtttctctagatatgtaagcttactctattaaccaaaatctcagcttgaccattcttgataagtacctaatcgacatgtaactttttttctgccttaaatatgtataacaggacagagcccttaaatctgattcaattattaattcctgatttacaagtgctatggtgagctaacagaacttatcaatgcctttattgcactttactagccaaatttagaaggttggaattagtctctcctatctagtattctgtcagtttgcccagcttgtacttttaattttgcttctaatggtaatctgccctatcccttgaaataaaataatctacattttgggagggctaattcttcattgtgccaggctgtcccatgcactgcaggggtgagtgtctttaggcttaaatgccaacagaagcccctagtaaatatgacaaccaaaaaagtgcccctacacatttctcagcatcctctggaatgacaggttactgcctctagttgaaagccactggcacaactttggtttttaagctcttatgccatttattttaattgcccagacatcaattccacctaaattcttagtcatagcctggttccttgaatttgctggattagtaaccacagattaaggtgtttcaatagttaagacaggactttggaacaagagtttttaaattgtataatacttgagaggatctatgaatataaattgggtcctgtttataattagttttacataatgaactttaagattgccttttcatggtgaacagaagtttggaaattactgttttggcacaaagcagattatcttagtagaaatacagaattactgcaatctgtgaataagactgcttttaaatatttctacttgtgtgctatcttacatatagaatgtgtacgacagttccaaattttagaataaatccatttctagcatctaacaaaatctgatactgtatcattttaaaacaaagtgtttactttaggcaggattttttaaaataaagcagcaatacccacgcagataagacaaaaaagctaaaatatctcacacctcctaatcctggagtgcaatcttttttcctcatcgtttttgatagggccaaacttgtgtctacagtaaaaaaaaaaaaaaaaagaattactaactggcaaccattaagattctatacttaccatagtcctttaataggcaagctgataaaatagcccccagttattaaaaaaaaaatccaaggaaaacccccaataattagtcttatctccaaattgcatgaagtctcctatatctgaaacttaaaaatgattctaatgacttcctctatcagtaatgtgttatcactgaggtgggtgatggggagggaagagggaagaaatctgtcagtattaccttcgaactcagaaatgtttaaaaaaaagtctcaaacattttgatggttagacaaaacacctccactgttatgtatgggcttcctttttggaaacttatgaacttgctatgtgagcttctgcaaattggttcaaaagcacatttaaggagttgataatttaagactatatgaatcagaattttaacactccattaaaataagagctgaaatttttggcatttatcttcagaacacctaaaaaacagactgcaaattcaactcacattaatactaaatctctttaaaattaactatatcataaaagacaatgactttgtcactaaactaagttttaaaaaaggtggcattctcatgtttcagtcccatgctgccatttgagatgaaaaaaaaggcaactgtcagaattttaattgtgatcagtttggacggctggtacttggtactttctcacaatccaaattagtaaacttgaaaactcaaaccaatttttgcttttagaattaaattcttgttgagtttttcaatcttgtactacaaagccttatggattagattcatttctttctctcacaaggtcatcccaaccgggctccatttcagttgtggcaacccgaaacagggcttggagatgctcatctgttaatggctgactcaaagtgtgttggtttcgagtcaaatatgaaaaagccttttcacagatttggttactatcaaacaaggatgccaccttacaggcaacccctttgataattgggtaggattcagcagacaatccagcataaaactgccccaagtctttgattctgtattcattccaaagattagtgtttgcctgaagttttgttagctccaccctcactgaaataggtgcatattcaggtttaaagttaaatggatttgaaaaaagttctaagtcctttttaatgaacctgaggtccttaaaatgtctctcaaattctttttggagacgacagatcaccatttgatacctatcaggatcaaatattttttcatcttccttattttgctgttttagctcatcaacaacttctctgagggcaggaaagtctgttagatttttttcctcaatatgtctttgaaataaattcagcttaacttcgaaagtacaaatatggtcaaaggcagcagcagcaaagactttactaactcgtaattcttcactgagttctcgaaggtgttccataatgtccaccaagaagccaaagtcacaaagccattgtttgtctgagaagtggactgttgttgcccctactgaaaccaagaacgcttccatttcttttcttagagagaatattagttttaaagttttccctctcctaagccaattgttcagacatcgtccattaaccctttcaccatgctctgattcagattccgttagtaaagtctgaaattcaggtcgcctaacgcctctggtcttaatcaaaactatccattcggatatggtatttatgatctgattaacatctacatcataggagctcaacagttccaagtgaagaaatcctgaataatgaatgacattccaacagttggggcttacggccttttctctcatgtatgagacgagtcctgagttctcaccaatcatcctcaaagtatgggtcgtggtcagtccaaccattctctgcaagctaagccctgctgtctgcagggactctaggattgccgacatgagcgcaccaacactgaaatgatgagtcaggttgattatggtcagaagatcttcttgcacctccaactcagggcctacaccgcggataaagaccaggaggtagttctcataggccacaaaagcctggtcgtccaaggcaagagaataggctttaaagtccctggctcggttaaaaagctggttgcgtagattcctgtcaatgctcaggatcctctgccttgtgatatctggagataagtcaacgccttgcaggacgcttacatgctcgggcagtacctctctcagcaacacctccatgcactggtatacaaagtccccctcaccccagccgcgacccttcaaggccaagaggcggcagagcccgaggcctgcacgagcagctctctcttcaggagtgaaggaggccacgggcaagtcgccctgacgcagacgctccaccagggccgcgcgctcgccgtccgccacataccgctcgtagtattcgtgctcagcctcgtagtggcgcctgacgtcgcgttcgcgggtagctacgatgaggcggcgacagaccaggcacagggccccatcgccctccggaggctccaccaccaaataacgctgggtccactcgggccggaaaactagagcctcgtcgacttccatcttgcttcttttgggcgtcatccacattctgcgggaggccacaagagcagggccaacgttagaaaggccgcaaggggagaggaggagcctgagaagcgccaagcacctcctccgctctgcgccagatcacctcagcagaggcacacaagcccggttccggcatctctgctcctattggctggatatttcgtattccccgagctcctaaaaacgaaccaataggaagagcggacagcgatctctaacgcgcaagcgcatatccttctaggtagcgggcagtagccgcttcagggagggacgaagagacccagcaacccacagagttgagaaatttgactggcattcaagctgtccaatcaatagctgccgctgaagggtggggctggatggcgtaagctacagctgaaggaagaacgtgagcacgaggcactgaggtgattggctgaaggcacttccgttgagcatctagacgtttccttggctcttctggcgccaaaatgtcgttcgtggcaggggttattcggcggctggacgagacagtggtgaaccgcatcgcggcgggggaagttatccagcggccagctaatgctatcaaagagatgattgagaactggtacggagggagtcgagccgggctcacttaagggctacgacttaacgggccgcgtcactcaatggcgcggacacgcctctttgcccgggcagaggcatgtacagcgcatgcccacaacggcggaggccgccgggttccctgacgtgccagtcaggccttctccttttccgcagaccgtgtgtttctttaccgctctcccccgagaccttttaagggttgtttggagtgtaagtggaggaatatacgtagtgttgtcttaatggtaccgttaactaagtaaggaagccacttaatttaaaattatgtatgcagaacatgcgaagttaaaagatgtataaaagcttaagatggggagaaaaaccttttttcagagggtactgtgttactgttttcttgcttttcattcattccagaaatcatctgttcacatccaaaggcacaattcattttgagtttctttcaaaacaaatcgtttgtagttttaggacaggctgatgcactttgggcttgacttctgattaccctattgttaaattagtgacccctcttagtgttttcctgtcctttatttcggaggacgcacttcgaagataccagattttatgggtcatccttggattttgaagcttataactgtgacaaaaaatgtgaagggaagagatttgaaacatgtggaaggaaaagtgagtgcagactataaacttccaaaaagacaagcccaaaatacacctaaacgttatgtcagattattttgttaaaatcagttgttagtgacgtccgtacgttaatagaaaaaagaatgcttcagtttggagtggtaggtttctagagggatttattgtgaaagtataaactattcagggcaatgggactgagagaacagtgggtagaaaggaccactgaaggaaaggaagagaattggaaggtagatgaaagaaggagcaagaacctggggatgttttttccttttcacttgtaatagtagtaacagaagcaatggcagactggcttttgtttctactgtgttagaatgaattgacaggacaactgggcctattattgtactgtgccagaatactgtaaaacaaaactaaacatactagcttggtggcttgtaattaattacttaagtggagatttttattttttttttattttttttttagacggagtctcactttgtcacccaggctggagtgcagtggcgcgatctcagctgactgcaacctcctcctcacaggttcaagggagattctcctgcctcagcctcccgagtagctaggactataggcatgtgccaccacacctggctaattttgtatttttagtagagatgggatttctccatgttggtcaggctggtgtcaaaactctcgatctcaggtgaaccgcctgcctcagccttccaaagtgctgggattacaggcgtgagccaccgcgccctgcagttttttgtatttttaatagagacagggtttcaccatgttagccaggatggtctcgatttcctgacctcaggtgatctgcccgctttggcctcccaaagtgctgggattacaagcatgagccaccgcgcccggctcaagtggagatttttatatggagtccagttatactctttttaatatataagttgagatgactaatacaacttcaatacaggggctcatgagaaatgtctgtaatatttaagtaacttattgtcttctttcttttttttttaagatgaagtcttactctgttgcccaggcggaagtgcagtggcgtgatcttggctcagggcaacctctgcctcctggtttcaagcgatcttcctgcctcagcctcccgagtagctgggagtacaggcgtgcatgaccacacccggctaatttttttatttttagtagagacggggtttctccatgttggccgggctggtcttgaactcctgacctcaggtgatccgcccacctcagcctccccaagtgttgggattacaggtgtgagcccccgtgcccagcctattatcttatttctgaataaagaattgtctgtgtggggaatagataactctttctcatgcagcccctgctagaaaatttgttttctctagcagttggtctgtgcttataggctactctttgaaagcacaaaaaatttattgacttcttttttttgggtttttttttttttttgagacagagttttgcccttgttgcccaggttggagtgcaatggcgcgatctcagctcaccgcaacctccacctcctgggttcaagtgattctcctgccttagcctcctgagtagctgggattacaggcatgcgtcaccatgcctggctaattttgtatttttagtacaaatggggtttctccatgttggtcaggctggtctcaaactcctgacctcaggtgatccacccgccttggcctcccaaagtgctgggattatgggtgtgagccattgcgcctggccagaaaattcattgacttcctaaagatttattaactttctgcattacttttttttttcccctccatcgtaaatataaaagggaatagtagagaaaatcattcagaattttattttttagtgacattatttagtgacattttattagagtcacttaggaacctgaggctgaataaagttcaggtaaaagtaaaattagttgagaagagacatctgccaaaagaaatctatttttaacttcacttgctgtctttcctagaggaacagaaatagtgctgaatgtcctattagaaatgatggttgctctgcccgtctcttccctctctctcacacaatatgtaaactcatacagtgtatgagcctgtaagacaaaggaaaaacacgttaatgaggcactattgtttgtatttggagtttgttatcattgcttggctcatattaaaatatgtacattagagtagttgcagactgataaattattttctgtttgatttgccagt

SEQ ID NO: 33 - DNA, 6521 bp, Homo Sapiens
acaaaattatgcatgggtaaaagatccaatcaggtgcagttcagaaaaacggattttttttttttttttgagacagagtcttgctctgtcacccaagctggagtgcagtggtgcaatctcggctaactgcaaccttcgcctcgcaggttcaagtgattcccctgcctcagcctcccgagtggctgggattacaggcgtgtgccaccaccacacctgactaatttttgtagttttagtagagacgggagggtttcaccatgttggccaggctgctctcaaactcctgacctcaggtgatccacccacctcagcatcccaaagtgctgggattacaggcgtgagccaccatgcccagacccaaatttttcttgttttctttctttttttgggggtggggggcagggtctcactctgttgcccaggctggagtgcagaggcttgatcttggctcactgaaacctctacctcctaggctcaagcaatcctcccacctcagcctctcgagtagctgggaccacaggcgtgcaccatcacacctggctaattttttgtatttttggtaaagacggggttttgccatgttgcccaagctgttcttgaactcctgggctcaagcgatcctcttgcctcaccctcccaacgtgctggaattgcaggcatgagccaccatgcctggaacaaagttttatttttcaagtggatcatttaaaaaaatgctttatggccaggcacgccacttctctccagcctgggcaagtgagccgagattgtgccactgcggtctggtctgagcgacagagggagactccatctcagataaataaataaataaaattaaaacaaatttaaacattctttatatgacaaaattattctcaatggcaattataaaatgaataataagggccaagaaataaactcagtgaatattttctttccttgaactttgtaaatataatcatgtcagcataaaaacagccatgcattgcttaacaacagggatatgttctgagaaatgagtcactaggcaattttgtcattgtgcaaacatcatagagtgtattttcacaaacctagatggtgtagcctattacccatctaggctacatggtatagcctggtgctcctaggccccaatgcttacagcatgttaccatactgaatactgtaggcagttgtaagacaatggtatttgtgcatctactgtagagacagggtctctccgtctgtcgcccaggctggagtgcagtggcataatcatagctccctgcagcctccaactcctgggctcaagtgatcctcccacctcagtctcccaagtagctaggactacacgcttgtgtcatcaggcctgtctactgtttttgtttgttttttggtagagatggagggtctcactatattgctcagactggttttgaactcctggcctcaagcaatcctcctgctgccttggcctccaaagtgctggtattacaggaatgagccaaaagctcaatatggctgttgaataaaagactgactcaatcaagtacggaccctgcccttatggagctgaaggccgttagagcagataaaatgagttatcacccttatatgagttagacggtggacaaagttattattgagggcaggcaaagaactgggttggctcaaagatgccagggatcttttccagactagtggtagagggttggttaaggagtttcctgaaggaggtggcctttcatctgagtttcaaagaacagaagagattagacagggaggacagtaaaatttttttttttttttgaaacagtctcgctttgtcgcccaggctggagtgcagtggcgcgatcttggcttactacaagctttgcctcctgggttcacgccattctcctgcctcagcctcctgagtagctgggactacaggcggccgccaccacgcccggctaattttttttttttttttttttcagtagagacggggtttcactatgttagcgacgatttttgtctgtttgtttgtttttgagacagagtctcactctgtcgatcaggctggagtgcagtggcgcgatctcggctcactgcaacctctgcctcccaggttcaagtgattctcctgcctcagcctcctgagtagctgagattacaggtgcctgccaccatgcccagctaatttttgtatttttagtagagacggggtttcaccatgttggccaggctggtctcgaactcctgacctcaggtgatctgcacacctcggcctcccaaagtgctggtattagaggcatgagccactgcacctggccagtaaaactatttgtgacacagcagcaagtgcacaagcactgacctatcagagttgaaggtggctgaggcactcaagtgggctcctggggactctgttatgccagggaatacctctttagataagggatcaggaggtctggagggtccctaaggaagagctagggtagcaggggtaccctggagctaggggccatggctatatgccaacaggattagaaatatcttaatgtatttaattaacctacacaaccatattggtgggtgcctactgaatattagccctagatatggacctgaaatggccttattctcttttagtttgtttaagccaatggagccttactagaatgtgagctacaaaacagtagagctattctctattcaatgctgcatctgtagggcctagaacagcacctgaaggactggcggaggcttaataaattgttaaaagggcagactagccaggtgtgatggcgtgtgcctgtagtcccagctacttgggaggctgaggcaggaggatcacttgatcccaggatttctgggctgtagtgtagtataccagtcaggtgtctgcactaagttctgcatcaacctggttgcctaaggatggttgaactgacccaggtggaaattggagcaggtcaaaactcaatgctgatcagtaacagggtcgcacctgtaaatagccaccgccctccagcctgggcaacacagtgagatcccatctctaaaataaattttaaaaataattaattagaaaaaaaaaccagcctgtaatcccagcactttgggaggccaaggcgggcagatcacctgaggtcaggagttcaagacaagcctggccaacatggcaaaaccccaatctctaccaaaaatacaaaaattagctgggcgtggtggcaggtgcctgtagtcccagctacccaggaggctgaggcaagagaatcgcttgaacctgggaggtggagattgcagtgggccgagatcgcgccacttcactccagcctgggtagcagagtgcgactctgtctcaaaaaaaaaaaaaaagaaagaaaagaaaagaaaaagaaaagaaaagaaaaaaactgggaggcctaagcccattcttggtgtcctcacactcttctgccccatctccttgcacccagtcttcccctgcaatctgtgctccatactagccctcaagccctcaacgtgacctagtatgagaactggattctgtcactctcctgctcataatattttatgccttccctttgcccagaatatcattctccctattgtttttaccaatggaactggtatttcttcaaggacatgatcaaatttgcctacttctatattatcttctaaagcagaattcatctctcttccctcaatatgatgatattgacagggtttgccctcactcactagattgtgagctgctcagggcaggtagcgttttttgtttttgtttttgtttttcttttttgagacagggtcttgctctgtcacccaggccagagtgcaatggtacagtctcagctcactgcagcctcaaccgcctcggctcaaaccatcatcccatttcagcctcctgagtagctgggactacaggcacatgccattacacctggctaatttttttgtatttctagtagagacagggtttggccatgttgcccgggctggtctcgaactcctggactcaagcaatccacccacctcagcctcccaaaatgagggaccgtgtcttattcatttccatgtccctagtccatagcccagtgctggacctatggtagtactaaataaatatttgttgaatgcaatagtaaatagcatttcagggagcaagaactagattaacaaaggtggtaaaaggtttggagaaaaaaataatagtttaatttggctagagtatgagggagagtagtaggagacaagatggaaaggtctcttgggcaaggttttgaaggaagttggaagtcagaagtacacaatgtgcatatcgtggcaggcagtggggagccaatgaaggcttttgagcaggagagtaatgtgttgaaaaataaatataggttaaacctatcagagcccctctgacacatacacttgcttttcattcaagctcaagtttgtctcccacatacccattacttaactcaccctcgggctcccctagcagcctgccctacctctttacctgcttcctggtggagtcagggatgtatacatgagctgctttccctctcagccagaggacatgggggccccagctcccctgcctttccccttctgtgcctggagctgggaagcaggccagggttagctgaggctggctggcaagcagctgggtggtgccagggagagcctgcatagtgccaggtggtgccttgggttccaagctgagtccatggccccgataaccttctgcctgtgcacacacctgcccctcactccacccccatcctagctttggtatgggggagagggcacagggccagacaaacctgtgagactttggctccatctctgcaaaagggcgctctgtgagtcagcctgctcccctccaggcttgctcctcccccacccagctctcgtttccaatgcacgtacagcccgtacacaccgtgtgctgggacaccccacagtcagccgcatggctcccctgtgccccagcccctggctccctctgttgatcccggcccctgctccaggcctcactgtgcaactgctgctgtcactgctgcttctggtgcctgtccatccccagaggttgccccggatgcaggaggattcccccttgggaggaggctcttctggggaagatgacccactgggcgaggaggatctgcccagtgaagaggattcacccagagaggaggatccacccggagaggaggatctacctggagaggaggatctacctggagaggaggatctacctgaagttaagcctaaatcagaagaagagggctccctgaagttagaggatctacctactgttgaggctcctggagatcctcaagaaccccagaataatgcccacagggacaaagaaggtaagtggtcatcaatctccaaatccaggttccaggaggttcatgactcccctcccataccccagcctaggctctgttcactcagggaaggaggggagactgtactccccacagaagcccttccagaggtcccataccaatatccccatccccactctcggaggtagaaagggacagatgtggagagaaaataaaaagggtgcaaaaggagagaggtgagctggatgagatgggagagaagggggaggctggagaagagaaagggatgagaactgcagatgagagaaaaaatgtgcagacagaggaaaaaaataggtggagaaggagagtcagagagtttgaggggaagagaaaaggaaagcttgggaggtgaagtgggtaccagagacaagcaagaagagctggtagaagtcatctcatcttaggctacaatgaggaaattgagacctaggaagaagggacacagcaggtagagaaacgtggcttcttgactcccaagccaggaatttggggaaaggggttggagaccatacaaggcagagggatgagtggggagaagaaagaagggagaaaggaaagatggtgtactcactcatttgggactcaggactgaagtgcccactcactttttttttttttttttttgagacaaactttcacttttgttgcccaggctggagtgcaatggcgcgatctcggctcactgcaacctccacctcccgggttcaagtgattctcctgcctcagcctctagccaagtagctgcgattacaggcatgcgccaccacgcccggctaatttttgtatttttagtagagacggggtttcgccatgttggtcaggctggtctcgaactcctgatctcaggtgatccaaccaccctggcctcccaaagtgctgggattataggcgtgagccacagcgcctggcctgaagcagccactcacttttacagaccctaagacaatgattgcaagctggtaggattgctgtttggcccacccagctgcggtgttgagtttgggtgcggtctcctgtgctttgcacctggcccgcttaaggcatttgttacccgtaatgctcctgtaaggcatctgcgtttgtgacatcgttttggtcgccaggaagggattggggctctaagcttgagcggttcatccttttcatttatacagg

SEQ ID NO: 34 - DNA, 6565 bp, Homo Sapiens
cgacccttaaatttcataagggttatcgtagttttctgaagtagaaaatgtagcccatttcttgccagctcatgggctacaccttgacctaagcatctttacggtgggtacttgcgcttactttgcagccttcgtcagagattatgctagaagatggcggtatataggctgagcaagaggtggtgaggttgatcggggtttatcgattacagaacaggctcctctagagggatatgaagcaccgccaggtcctttgagttttaagctgtggctcgtagtgttctggcgagcagttttgttaatttaactgttgaggtttagggctaagcatagtggggtatctaatcccagtttgggtcttagctattgtgtgttcagatgcgttaaagccactttcgtagtttattttgtatcaactggagttttttacaactcaggtgaattttagctttattgaggggaattgatctaaaacactctttacgccggtttctattgacttgggttaatcgtgtgaccgcggtggctggcacgaacttgacgaaccctagggttagtatagcttagttaaactttcgtttattgctaaaggtttatcactgctgtctcccgtgggggtgtggctaggctaagcgttttgagctgcgttgctgcgtgcttgatacttgttccttttgatcgtggtgatttagagggtgactcaccggggcagggatgcttgcatgtgtaatcttactaagagctaataggctacgaccaaacctatttgtttatggggtggtatgagcctgtcgaaacattttcagtgtattgctttgaggaagtaagctacataaaccgtatggggtgtctttggggtttggttggttcggggtatggggctagcagcggtgtatatgttgagtaaggtgggcagggagttgcattgatggggttagtagaatgtgagttgagggaggatgatgtgttagttgaggggtgactgttaaaaatgcactttccttcctgccaccatgtgaagaaggatgcgtttgcttccccttccaccatgattttaaatttcctgtggcctccccagccatgaggaactgtgagtcaattaaacctctttcctgtacaaattgcccagtcttgggcagttctttataagaacatgagaatggattaacacaggtccaattctggccacccctcaacctcccaagccattggagttgacttcctgggcagtcttaatatgattacccctcccactctccagtcaccagggcatatcaggcttcatgaactactgactccaacccctgggttggaggacaggaaaattcttagcagaggctaactggagatacccgcttctctccaggatctctagaaccatttcaatactttgaaatgttttaccttcagacactgggtaatgaatgttaagtacaaaatattattgggtattgtggttaactaggaataacagagtagaagattatgacccatttcagcccatcctaaaattcacattttattgcatttagggttgggtccagaaaggggatcatcacttaattttagcaagtcccaaaaaatagttgttttgactttatgtgaaactacaggttattgattacactgtataatttatatttgggcctactgaatgatggttcaagataacttgcaaatctgataccacagtgagctatttaatgtttaatgtaacttttcaaggtgatgaaatcaattactcaggtagtagaataagttattgtcatgtagtataaataactgcttattaattttctataatcacctttgtgatattaagcagcttcatcaatagctccttttatacaatttcattttatcatatactgatctccactatgagacatgattttcttgtggtgaatttatgttaaggtacttacttgagttctctgctgagaactaaattaattctaccctttaaaggtcgattcttctcaggaatggagaacccaggtcttcttacccataatcaccagattctgttacctataaaatcacaaagaaagcctaagtatattttgggaatatacatatattttcatgtattatatacaacatgtccttgaataacatcgttttcttctaacgttgatgagaaaaataatcaattcctggccagggccaccgtctgtgtggagtctgcatgcttttcccatgtctgcatggggtttctccaggtattccagtttccttccacatcccaaagacatgcacattattcttcttaaatgtatgtatagctcatatttacttcagtgttttctattagaagtgtttttggccttcatttagaagtttggtgatgtttttgtgaccagcaatatgccctaggaacttaactcttgtgtacatccagtagcctatggtaaaattggttttgctctacattgtttcacttaaagtcacagtttccaagaactcacagatgacattgaggactatctatgtgcatagatatgatggacatcctgacatttagtggatctcctttaaaaaactgaacttaaaagtcttaccaaaattcatacttatcactcattacctaaatctaactatttttccctttggcattatccaatttatatccaatatttagttttaatcatttgcaattgtgtatgacatagtaaagattctggggaggccaagatgggcagatcacgaggtcaggagatcgagaccatcctggctaacacggtgaaaccccatctctactaaaaatacaaaaaattagccaggtgtggtggcaggcgtctgtagtcccagctactcaggaggctgaggcagaagaatggtgtgaacccgggaggcggagcttgcagtgagcgtagatcgcaccactgcactccagcctgggcgacagagcaagactccctcttaaaaaaaaaaaaaaaaaaagattctgagtcaaagtgctcaagttgaatgcattttgtcatccacaagacaaatcgtgttaaccccttgtggtttactttatctataaaatagagataacaatagttcctgcttctagggttgttgtgggaattaaagacttagaataatgttcagcctctaatcagtgctgtcacaactgtctgatacaattgtattatatttgtgtactttgtagattgatattaaatcatacttttaaaaataggtgcttaatgttccactcaattaccttaaaacatgtttaattatgtctctatcctactcttataacacttctataaaaactttttacatatagcgtccacttttggttcagtttcttaggaaaataactttgagagtcagctatctgaaccaaagaaacattaacattaccagactatattgggatttttgagactggcttttatcaattctttagctacgggctcttgtcatcatctctaccagtgacctaagtgtcaaacccaaatgccttgtatctgtcccattaaagagatgcagcatctgctcctttcttactgtttccatttcctctgccatgcctcctcttacaaccataaatatccaggtctcttaggttttaaacggggcatctctcaacccccacattcttttccttggttattcccttccctccaacagttcaattcacctagatccccacgcctgaaattatcctagatgtcctagaggcgcctcatcattacaatggtacattattctccactcctttacatgtcacgccagctttcaaactgaaaatctgagcgttcatccctggtgcatcacctttaaattccagatctccaaaatccagggtcatgtaaccttaaaaaatttttaccctctcttctccactgcccttgttcaggccttatctcttccagcagctgttccaaaggcctactctgttttcctttcggagtgctaacctccaccgaagcctccacccagttgccaattctgccccatgcctgataatttgctcgtgcgttgacatacataaaatttctaagacaaaaattttttaataatggtaaatgaaccttgggaactgcatacagatcatacagatccataataagagaaaaggtcccagattaacacggaaaactttccatttaactaacatttgcactggtaaacttcatcaagcaagaccctacttaatcccacattaccttctactgaagaggttgtggtcattctctggaaatatctgaattcattcctacaagttagagaaacagcgttactcgaaacattatcccttgggctcgagctctaaggcacctgacaaacggagcgctgtgggtaggggtgaggtgttttctccagggctgggactttgccctgggcgagggcgccgcagggcaaagacctcaccgggcagcagaatccgggcagaaatcagcaactgggcctcccgcgcagcagaaaaggggaatccagtcggggcccacccttcctgccagcgcagaccgcaagtctggccccatcctctcgccgggagtcggcctggcgcgtcccgcccaggtaccccgaccgtgggcagcctgcgcccgtttgggtcccatcgccccggcccggcagatacctgagcggtggccagggcaggtccccgttcttgccgatgcccatgttctgggacacagcgacgatgcagtttagcgaaccaaccatgacagcagcgggaggacctccgagcccgctcgttacagcagaacgcgcggtcaagtttggcgcgaaattgtggccgccccgccccctcgtccctatttgtgcaggcgaggccccgcccccccgccccggcgcacgcagggtcgcggcgtgctcgcgcccgcagacgcctgggaactgcggccgcgggttcgcgctcctcgccgggccctgccgccgggctgccatccttgccctgccatgtctcgccggaagcctgcgtcgggcggcctcgctgcctccagctcagcccctgcgaggcaagcggttttgagccgattcttccagtctacgggaagcctgaaatccacctcctcctccacaggtgcagccgaccaggtggaccctggcgctgcagcggccgcagcgcccccagcgcccgccttcccgccccagctgccgccgcacgtagtaggttctgtctgggactgggcagggccatcggggctgggggggcggggcttgtgggtaaggcgggcggaggcgtggaccctccgcccgatgatagggctggaggaggaaggggcgggctgaagaaggggaaggtgggaagagcccagccggggctacaaattgggtgaagcgctgaggttttagtacttccgtttgaggagataggcaaaggttatgcaggtttttaatggcaggcctgagacaggaactcaggtctcctgactcccattctgatgagggggcttgtgggcaaggggtgcgtcttttaacctccatcctttttttttttccttggtggtcgaagagttttactgattttttaaaaaagtgctggattgggtgactagaagaaagctgcccttaggtctccagtttttaagactgcaacagcatggctcaatatttgaaatcactacggttaaaagcagtcatattgtgcagttccccagtgaacactttttgtagtttagattataaagtctgaaatacagtttgggtggataaagtttcttaggatggtatagatgtgactaatcatggagtccttcctgttgccgtccttcaacgcaataagtacgtttgtttgtttttaaaccagagatactgccacaggaaaagcccaagggtgacccctcacttgggtcacctgcacagtatttttcagactgaggctgtggaagggcattgaagactggtgtttagccacctaccgtgttttaatgtaggtggcagcttgggtgcttcaaaatcttgttcctttcgtatatatttctcccttaaaatgattactcctcttctgttttttttgaggacgagctacgttttcatgaattcaccaaaattttgcacccaccatttaaagggtagctggtgaaggacttatgtatgcttttggcaagttttctgccaagaaaaaattcataatcttgtcacatctttagtgatgaacataaaccttttaaacaggaaacacttaaattgcaatgaacatgtcaaaaatgatactgttcttttattacctatcttttcccctctgtgcctttgctacataactgtttatttcttagaggtattttatttagcatatgtaagtagggtgattcaagttttataattagagaaagctgaaggctcattgaatcaagaccggtagcagccttggtttcaattaattctaaacacggcttgagttgctgaggctcctgactatcagactctaccttgtcttttatggtgttaaaaacagttcacccatagggttttccagagctaaaagtagaggattctttgaagagtggatggcaaggaaccttgtcattcagttgtaaagtttaaattggttcacatacgtcaggccttctcagagtagagataacacatcattttctaaccttcccgatatagg

SEQ ID NO: 35 - DNA, 2891 bp, Homo Sapiens
  unsure (223)..(366): unknown base
  misc_feature (223)..(223): n is a, c, g, or t
  misc_feature (366)..(366): n is a, c, g, or t
cccctttcccccgaattgttttctcttttggaggtggtggagggagagaaaagtttacttaaaatgcctttgggtgagggaccaaggatgagaagaatgttttttgtttttcatgccgtggaataacacaaaataaaaaatcccgagggaatatacattatatattaaatatagatcatttcagggagcaaacaaatcatgtgtggggctgggcaactagctnaagtcgaagcgtaaataaaatgtgaatacacgtttgcgggttacatacagtgcactttcactagtattcagaaaaaattgtgagtcagtgaactaggaaattaatgcctggaaggcagccaaattttaattagctcaagactnccccccccccccaaaaaaaggcacggaagtaatactcctctcctcttctttgatcagaatcgatgcattttttgtgcatgaccgcatttccaataataaaaggggaaagaggacctggaaaggaattaaacgtccggtttgtccggggaggaaagagttaacggtttttttcacaagggtctctgctgactcccccggctcggtccacaagctctccacttgccccttttaggaagtccggtcccgcggttcgggtaccccctgcccctcccatattctcccgtctagcacctttgatttctcccaaacccggcagcccgagactgttgcaaaccggcgccacagggcgcaaaggggatttgtctcttctgaaacctggctgagaaattgggaactccgtgtgggaggcgtgggggtgggacggtggggtacagactggcagagagcaggcaacctccctctcgccctagcccagctctggaacaggcagacacatctcagggctaaacagacgcctcccgcacggggccccacggaagcctgagcaggcggggcaggagggccggtatctgctgctttggcagcaaattgggggactcagtctgggtggaaggtatccaatccagatagctgtgcatacataatgcataatacatgactccccccaacaaatgcaatgggagtttattcataacgcgctctccaagtatacgtggcaatgcgttgctgggttattttaatcattctaggcatcgttttcctccttatgcctctatcattcctccctatctacactaacatcccacgctctgaacgcgcgcccattaatacccttctttcctccactctccctgggactcttgatcaaagcgcggccctttccccagccttagcgaggcgccctgcagcctggtacgcgcgtggcgtggcggtgggcgcgcagtgcgttctcggtgtggagggcagctgttccgcctgcgatgatttatactcacaggacaaggatgcggtttgtcaaacagtactgctacggaggagcagcagagaaagggagagggtttgagagggagcaaaagaaaatggtaggcgcgcgtagttaattcatgcggctctcttactctgtttacatcctagagctagagtgctcggctgcccggctgagtctcctccccaccttccccaccctccccaccctccccataagcgcccctcccgggttcccaaagcagagggcgtgggggaaaagaaaaaagatcctctctcgctaatctccgcccaccggccctttataatgcgagggtctggacggctgaggacccccgagctgtgctgctcgcggccgccaccgccgggccccggccgtccctggctcccctcctgcctcgagaagggcagggcttctcagaggcttggcgggaaaaagaacggagggagggatcgcgctgagtataaaagccggttttcggggctttatctaactcgctgtagtaattccagcgagaggcagagggagcgagcgggcggccggctagggtggaagagccgggcgagcagagctgcgctgtgggcgtcctgggaagggagatccggagcgaatagggggcttcgcctctggcccagccctcccgctgatcccccaaccagcggtccgcaacccttgtcgcatccacgaaactttgtccatagcagcgggcggacactttgcactggaacttacaacacccgagcaaagacgcgactctcccgacgcggggaggctattctgcccatttggggacacttccccgccgctgccaggacccgcttctctgaaaggctctccttgcagctgcttagacgctggatttttttcgggtggaaaaccaggtaagcaccgaagtccacttgccttttaatttatttttttatcactttaatgctgagatgagtcgaatgcctaaatagggtgtcttttctcccattcctgcgctattgacacttttctcagagtagttatggtaattggggctggggtggggggtaatccagaactggatcggggtaaagtgacttgtcaagatggcagaggagaaggcagagggaaaacgggaatggtttttaagactaccctttcgagatttctgccttatgaatatattcacgctgactcccggccggtcggacattcctgctttattgtgttaattgctctctgcgttttggggggctgggggttgctttgcggtgggcagaaagccccttgcatcctgagctccttggagtagggaccgcatatcgcctgtgtgagccagatcgctccgcagccgctgacttgtccccgtctccgggagggcatttaaatttcggctcaccgcatttctgacagccggagacggacactgcggcgcgtcccgcccgcctgtccccgcggcgattgcaacccgccctgatccttttaagaagttggcatttggctttttaaaaaacaataatacaatttaaaacctgggtctctagaggtgttaggacgtggtgttgggtaggcg

SEQ ID NO: 36 - DNA, 1092 bp, Homo Sapiens
aagcttccccttcatcatccaagaaggcattcaggtctttctgtgctaggccccaggtaaagtgctggactacccagtaattgggttcagtagcaggatggcctcagattgaggtcccagggccaaaggaccactcctctcctcagcgctggtccgggaaaggcaagctccgggcgggagcgcacgccgcgcccccgaagcctggctccctcgccacgcccacttcctgcccccatcccgcgcctttccaggtcttctcccggtgaaccggatgctctgtcagtctcctactctgcgtcctcggccgcggcccgggtccctcgcaaagccgctgccatcccggagggcccagccagcgggctcccggaggctggccgggcaggcgtggtgcgcggtaggagctgggcgcgcacggctaccgcgcgtggaggagacactgccctgccgcgatgggggcccggggcgctccttcacgccgtaggcaagcggggcggcggctgcggtacctgcccaccgggagctttcccttccttctcctgctgctgctgctctgcatccagctcgggggaggacagaagaaaaaggaggtagaatggatccccttggccttcccctgtggtcgggggcgggccagggtgggccgcgttgcccaggcagccctgccgtgttgctaggcagcctggtcgccggcgtgggcgatgccggcgctggggcgggagccgcgagggtgggaggccctggggcgtttccgggacgtggagttagcagggttctgacttgaaaaacgacggcaaagcgtgttcttgactgcttctgagcacctcacacctttcagacccagggcgcctttattcccagctggaagcccagcttagagcaatggtgccactaaaaggggtgtgttggatgtgaaaataccctttggaagtatttataagcctgcaggaaatatgttttccttattttcttactctgctcccttcattacccatttcaagaagcaacagaacctgtgcagagtgtgttttaagttacactgtatgtttatttttgtttatgttgaactcggtgtatacttgtgagaataagctt

SEQ ID NO: 37 - DNA, 5203 bp, Homo Sapiens
agggaacccaacgcccctccggggcagaagggggcagcgcgcgcgaggcggaaggacagtcactctcgctgcacaaactttcccgcgggccgcgccgcgcgtgcaggggctggacgccacccggcgccagagccgggcctgaggagcggggtctggccgggaacgagggctgccagcctgggtggtgtcatttgttgcttcatttttcattccctttcctctcgtgaggaatcagaggcatcgggccgcgcgggctgagaattcttaaattctccccggccgcattcggctgagccaacccgcagttcctgtcagcccctctgtcccccgggcagcggttttccccgctagccaggtttggaagtcaccctctgtgagactgggttaggaagtgacgaaaagcgccgaattgttttcaaattgaaaatacttttttttttttttttggagatagcgctgacaaatatatgggatcccggcttttgatccctggctgccgcctctgttctcctgtcgctaataaaactcgcattgagccccttagtgccttgattaacaggcagattaactcttactggggttgggaacagcttgtcctaatcaatgtcattttaaaagcccgtcaggatgcgcttagcttcggttccctggatgcttgagcgagccagccatgacatttgctccctccccctccccagcctcaaatcccccagtaaagcccccagttcccgcctgcctgttcccaggtctacaacgggacaaatcgcaggaccgggtcgttggcctttagaataggcagcggtttagagaggggatatccagggagaagggactgaggtggccttgacttgcttgcttttcctttgaagctgaactcttgcctcttgggggcagaggttacagggaaaagagagatggggggatcgtcacagggtgatgaaatggaaagcaaacttttctaggaaccctatttgcaaaaatcggagagtgccgctgatttcagttgtcctacatgtcaggagttttaaacctaactcctatctggacaacagcatggagggactgggaggcaaagccttgggagtctgacccgctgggctgctaggaatccctttgctgggagactccactggacaatgttattttaaaggtattttgggggtgggcagggagaagacagagagagaaagagagagagagagagagagagagagagagagagagagacaggctggcctcccagagcgaacggaagaggactgaggactgaacccagggagcccctagcactggccatttggcaggaggcgaggaagggcgagggcaccgcggcttccccccaagccgagcagtggccacagcctgaaggtgccacggggcggctctgggatcttcttggcttttctaggctctgggctcggcgaggctgccgggttagcgggaaccggcaggttgctggagaaaggagagggacaaaggcctggaagtgggggaggcaccagggactgggcggccgggatgggagcctttgcctttagggctcactggacccgtttgccagctccgcggacaagggatcccaccttcccagggtctgcaaaaagagagacgtttggggcactacaaagtgacgcaggtgtctgccaagactttccttctccaaaaaatgccagtcttcaccctttccagcgcgccggcgctgcgcctctgcttgaccggggaaagagagagtttggaggtgtcagaactgtcagaactccggatgggaggctcttggttctgaagctgggagctggaggcacttccccccagaagtgggcacttctttgcctccccgaaggcctgatggggtgggcacaggggaatgccagggatcggtgcgggtgagatgcttgcctcacctcatgttgacgcatcaatactggctagaagctctgggcaggctctggcgagccacggtcccccagcgggactccctccacgcagacagccccgctaccgggtgggacgaccccggcggcccccgcgggaacgcacccgccggcctgagaggtcctccctctggccacagggggcggagggtaggggggaacaggggcctgtggggaggcggggaaaggagacagaacctaaagcgcaatccccgccgcccccccgcgtcttggagggcagcaagtgggcctcgggcgtgttggtagccgcaattaaaatggcgacctgcgagttgtctcggttttgtacacacctctggcaaccgcgcccgcacctcagtctcggcccccacacccctaggccgcttcgcccccagagccggtacttggcagagggagtgaggctccccacgaggtagaacagcacccccaccttccttgagaccagtccagagagaacgaggaaatctcactctcacccctctctccttaaactttgaaaactcggcctcattctggggttgaactcccctccccaaatattgacacatgggaagcagccaagtcctttttgttttttgtttgtgcggaggagtttccaggagtctttcccggagcccccttccccacccaatgacgtcagtggcattcactcctcgctccttgccttttctgattttttgttaaaacttttctccgcagcgagatgggggttggaggggtgggagaaggagctgattcaaagagccagtgccctggggggaaatagcaacaagattacggctgcttctttccgaggcaaagcttaagaaggtgctaatccactcggtcgctaattgagaggttgtaaaaatgatactcgcctccagttcggacagaatcacttcccccccccccgcccccccgcaagtccctcgctcatgcacagcggacttgagtcttgagtccaagcttctttaatgctcgcttggaaagtaaaaggagagagaaagagaaagccgactttcgctggtctgggactcagggccgcggccccacttgccggcatcctccgaaagtcgcgctcctgcgaaatgaaacctcgcccaggaggccgcggacctggacacccggcgccacctccttcacctctgacccaggtttcctcccggcgctgcgagctcccggggaagggttagagccggcagccctccccagcccggggaggggagagggttatgcgaccccacctctggctagggccggggaggcctttgcttcccgggagccctgcccgggctccttggtcgcagggctgctgggtcccaggcaggaacgagagggtgaggcccacatgtggcccggcggcccagggcggcttgcagcgtcctcactgtcccggctgccaggggctgcggcgacgcggccagtcagcagcgagttcaggtcgcgcagattttattgatgagctctgactttcagcactttccctaagtcaagaagagtctagcgtacccttcggctgcttcatttcagcctccctgcctcagctcttcagccctattccccctcgccctgtcctggggtgtgtacagcagcccaggccttccttctccttcccggctccgtggcccgaagccgccgagagagctcgggacagcgcaggaccaggcagccgctcgctctcctgtcaccttaactgcaggctccgaggggcgcctttggagtgtactgaggtgtgtcctaatcgtgcggcattcaacaaatggacttctggtgtgtggtcagaagagaaaagccatttacttactttcctccccggttttctggcaacagctgaaggggagctgcctccgtggactgagcagacccaggagagggagtcgtggtgcggagacacacgcaccacacacagatgaccggtggcacacacgacacacgctgacataccgacatcgccagtgggacacacacacacacacacacacacacacacacacacacagagagagagagagaatccctcccagcattggtcatccgcccccccacccaggcttccactccccctcccctcttatctcccctggcttcccctcctctcgggcgctgcgaaaagcagccgcacttagtcaacaaatggcacgtgggagaagttggtgagtgtttggtgaggactcttcagggcttttcacaagaaccctctgtacacaaagtaagtggcgtgtttactcgggcctctccagccagagctgtgcctctgctccgctgcgcaccgcggcttccgaaaggagaaaggagagaagaaagggcggggagagcggggtggaggatttggacaggccctggaggcttgggctggggaggcctctggcctcgtttagttctcggcccggcaacctcctctcggcctaggcttcgccgcggcctccgcagctggaatggagctgccaggacccagtgacgctcccgcccctttcctcttcttccaaggggccaggtgggctggggtgcggccgccgctgtgctctgtgtcttggggccccggctgggatggggtgggggcgggcgggggcggggcggcaggccacgctgtcctggagttggcaagaaaggacagcacagaaacttgcaccctccgaggactgggagtcccgagtccagcttagggggagtgggggcgcgacccccaacccagaaaccttcacttgaccgctcaagttcgcggcagcagggcgggccgcgccgaatctcggcgtgcgcggagcggggagatgcaggcgagcgccagagcccgggctcgggggccctgcgccggggagaggagccgggacccaccggcggagccgaaaacaagtgtattcatattcaaacaaacggaccaattgcaccaggcggggagagggagcatccaatcggctggcgcgaggccccggcgctgctttgcataaagcaatattttgtgtgagagcgagcggtgcatttgcatgttgcggagtgattagtgggtttgaaaagggaaccgtggctcggcctcatttcccgctctggttcaggcgcaggaggaagtgttttgctggaggatgatgacagaggtcaggcttcgctaatgggccagtgaggagcggtggaggcgaggccgggcgccggcacacacacattaacacacttgagccatcaccaatcagcataggtgtgctggctgcagccacttccctcacccacactctttatctctcactctccagccgctgacagcccattttattgtcaatctctgtctccttcccagg

SEQ ID NO: 38 - DNA, 8085 bp, Homo Sapiens
  unsure (2545)..(2545): unknown base
  misc_feature (2545)..(2545): n is a, c, g, or t
gctccatgacctaatcactccccaacacctcctcctactaagactatcacattggtgattgggttttgacacacagatttggggagaacacaaacactcatatcacagcacctactaatttatccagccatttcactgctaggtatttacccagaaaaaatgaaaacacatgttcatacaaagacttgtacaacattttcatagtagctctatttataataccaaaaaaattggaaacaactcagatatttatccacagttaaatggataaacaaactatagtatataaataaaaagaataaaaagaattaactattgatacatactataatttagctgaatctcaaaataattatgctgagtgagagaaaccaaatgaaaaaaagatacactatattatatacaattctaagaaataaaacctaatttatttggcacccagatcttcatttctataccagtttcaaataaaaagtctcaaacttccttggataaatggctgattctacgactggggcaggaaatatacaagatgagtctgatgagtctgtagcatcttgtaataccagaaagtaggaaagtccacacatacacacacatacacacaatacagagagtgggtcaaggagcacaagagtcaactgaaaaagcccccagtgccaaaaactggaaaaatttgagcaacaaagtattcatgaatccatacaaagaaaagactgaataaagaagtaaatgggggagaagaagcaaatcttcctcacagaattccaaataaattatgtagatactccactccaaaggagggctagcataactccctactcccccacacttccttaagtgactcataatgatttccttccaaagagtacagagtatgcaaagagggaaaaaagagtaactatgcaatggagaaacctgacaaacactacttcagccaggtgatggagaacaacattaacagtcataagtcatgttgacaatatgtacccttcatatgatgtaataaatacagtacattacctctttgatttccaccccgccaaaacccaaaaccctagtctactcatgaggatacatcaaatcccaatagaagggcatcttgcaatatacctcaccagtactcctaaggactgtcaaggtcatcaaatacaaggaaaatctgagaaactctcacagccaagaggagcacaagacatcataacaattaaatgtggtgtcctggatggaatcctggaaaggaaaaaggacattaagtgaaaatgaagaaaatctaaataaactatgaatattagttaataacaatttatcagtattagttcattaattgtaacaaatgtaccctattaatttaaaatgctaacagagaaaattgtacaaatgatatatgagcattctctatattatctgctcaatttttctgtaaatccaaaatcgtttcccaaaagtaaaatctattaataaaacatctaaagcaaacagacctaaaaggcatatgcaaatgtataatttaatgtttaataaatcagatataaatatttttaaaaacctaatatttggtgacagaaagcagattagtggcttgccagaaagtggtgattagtactaggggaaggggatgggacagaacagtatgaagggatttaaaaaatggcatgaggaaacttttggaggcaaagggtatgtttatcattttagtttcacaggtctaacaacaaattatacaatttaaatatatgcagcttattatatgacaactatatcttgataaagtggtttttttccccaaactatagaaaaaatacttccacatttaaatcctcttctccaaaaacagtcttcaggaatatttgaagttagccccatcacacctgaatttaatcagtgaattttgttcattcaaagattcatacatttgggaagttcctgtgccaaaaatgctaatcacccagcatcaaaatttatggaataatggtgatttaggacatgctggacatctttattgttgttttcccacttcaagattttcaatcttttggaaacaacctccccagacattctgacaagggaattattataaccaaccaaaatcaagccaaatatagtttgtcagatttaaaatgaggccaagtgccaattttacagcagcgaccggaaaatcaaattatatggcatctgacatttaaaatcacactcctaagaaggctgtcatttgatgtcttgggtttgggttacagtacttaactttataatactgggtaaccttgtgcctcagttttcccaactatgaaattgggataacagtacctattttgtgagactgttgaaggattacagttaacacaggtaaaaggcttacaagactacctggcaatgctgtcctgattttacaaattctatacactgtgtggcattagccatcaggaaaatataaataaatcagtgagataccacttcacacacttggggggctataacaaaaaagacagataaaaaatgttgtcaaagatgtgaagaaactaggacccttattcactgctggtgnaaatgtaagaagtacaatcatttgaaccatagtctggcagttactccaaagaccacacctagagttgccatatgaaccagcaattccactcctatgcatatatccaggagaaaggaaaatatacgctgcacaaaaacttgtacatgaatgttcattagcaggatttttcatggtagccaaaaggtgtaaacaacccaaatgtccaacaactgatagagatggataaataaaatgtggtttatccatacaatgaaatattatttgtcaataaaaaggagtgaaggagtgaagtactgattcatgtggaacatggatgaaccttgatccaaaatagccaaatcacaggtacaaaaagcatattagtggctgctgggagatttaggcggaaatgtggaataactgctagtgggtattgagattttagagtcatactcatgttacaaaattaatagtgctgatggttgcacaactctgagtacatgaaaaatcaatgaactgatactttgagtgagctgtatgatactggaattacacctcaataaagcatggtaactgttttaagataggctggaaagagaaagcctgaaaacaacaataatgatattaataaattagtttacttctctagtctcatatacttctgtgcccacacttgctcctgttctattcataatggtccccttgcagttgccatattatatcctgccatttgatgcccggtgaacattctatacctgcttcccagaattctctttacctttcctctatctgcctaacttccacatatctaaaattaatcagagtaaactatttactagaacaaccaactccaaatcctagtaacctaacatgataaaggtttgtttctcactcatatagcccctccccagatgatcgaggggtccaggctccttacctctagtggctcccccaccttctggagtcttctgcattctttatacatggttgagataaactatgagtcattagcacagctagaccttgaggtcctacaagaaaatttgcaaatcattcactctgttttgaacaaggtatatttaagatgatgttaaaatacccaatggtcttgggtcaaatacagtttatgactgtgtatctaaaatatatattgcaatattcttccctttttctactgacttcatgaatttagcggggatccattttataagctcaaagataattacttttcagactaagaatatttagggtaaaaagtactgttcaacatctctactgaggatgttatgatgtagcacactgtataagctggagctaaaggaaactttccttaaagtgctatttactaaaaattggaacacattccttaagacaaatcgaagtgtggcacacaacatccaaacttccatcatagatacagaggtgttaccatctcccactcccaaatttctttgtcacgctgaggatactcaagaggagcaggacatgttggtcgcagcaggagaaacttgaaagcattcacttttatggaactcataagggagagaatttcttattttagtatcgtccttgatacatttattattttaaaagataatgtagccaaatgtcttcctctgtgttaaatctttacaaaactgaaatcttaaaatggtgacaaaaattctacttctgatagaatctattcatttttccaattagatagggcataattcttaatttgcaaaacaaaacgtaatatgcttatgaggttccatcccaaagaacctgctattgagagtagcattcagaataacgggtggaaatgccaactccagagtttcagatcctaccggtaattggggtagggaggggctttgggcggggcctccctagaggaggaggcgttgttagaaagctgtctggccagtccacagctgtcactaatcggggtaagccttgttgtatttgtgcgtgtgggtggcattctcaatgagaactagcttcacttgtcatttgagtgaaatctacaacccgaggcggctagtgctcccgcactactgggatctgagatcttcggagatgactgtcgcccgcagtacggagccagcagaagtccgacccttcctgggaatgggctgtaccgagaggtccgactagccccagggttttagtgagggggcagtggaactcagcgagggactgagagcttcacagcatgcacgagtttgatgccagagaaaaagtcgggagataaaggagccgcgtgtcactaaattgccgtcgcagccgcagccactcaagtgccggacttgtgagtactctgcgtctccagtcctcggacagaagttggagaactctcttggagaactccccgagttaggagacgagatctcctaacaattactactttttcttgcgctccccacttgccgctcgctgggacaaacgacagccacagttcccctgacgacaggatggaggccaagggcaggagctgaccagcgccgccctcccccgcccccgacccaggaggtggagatccctccggtccagccacattcaacacccactttctcctccctctgcccctatattcccgaaaccccctcctccttcccttttccctcctccctggagacgggggaggagaaaaggggagtccagtcgtcatgactgagctgaaggcaaagggtccccgggctccccacgtggcgggcggcccgccctcccccgaggtcggatccccactgctgtgtcgcccagccgcaggtccgttcccggggagccagacctcggacaccttgcctgaagtttcggccatacctatctccctggacgggctactcttccctcggccctgccagggacaggacccctccgacgaaaagacgcaggaccagcagtcgctgtcggacgtggagggcgcatattccagagctgaagctacaaggggtgctggaggcagcagttctagtcccccagaaaaggacagcggactgctggacagtgtcttggacactctgttggcgccctcaggtcccgggcagagccaacccagccctcccgcctgcgaggtcaccagctcttggtgcctgtttggccccgaacttcccgaagatccaccggctgcccccgccacccagcgggtgttgtccccgctcatgagccggtccgggtgcaaggttggagacagctccgggacggcagctgcccataaagtgctgccccggggcctgtcaccagcccggcagctgctgctcccggcctctgagagccctcactggtccggggccccagtgaagccgtctccgcaggccgctgcggtggaggttgaggaggaggatggctctgagtccgaggagtctgcgggtccgcttctgaagggcaaacctcgggctctgggtggcgcggcggctggaggaggagccgcggctgtcccgccggggcggcagcaggaggcgtcgccctggtccccaaggaagattcccgcttctcagcgcccagggtcgccctggtggagcaggacgcgccgatcgtccgggacgtccccgctggccaccacggtgatggatttcatccacgtgcctatcctgcctctcaatcacgccttattggcagcccgcactcggcagctgctggaagacgaaagttacgacggcggggccggggctgccagcgcctttgccccgccgcggagttcaccctgtgcctcgtccaccccggtcgctgtaggcgacttccccgactgcgcgtacccgcccgacgccgagcccaaggacgacgcgtaccctctctatagcgacttccagccgcccgctctaaagataaaggaggaggaggaaggcgcggaggcctccgcgcgctccccgcgttcctaccttgtggccggtgccaaccccgcagccttcccggatttcccgttggggccaccgcccccgctgccgccgcgagcgaccccatccagacccggggaagcggcggtgacggccgcacccgccagtgcctcagtctcgtctgcgtcctcctcggggtcgaccctggagtgcatcctgtacaaagcggagggcgcgccgccccagcagggcccgttcgcgccgccgccctgcaaggcgccgggcgcgagcggctgcctgctcccgcgggacggcctgccctccacctccgcctctgccgccgccgccggggcggcccccgcgctctaccctgcactcggcctcaacgggctcccgcagctcggctaccaggccgccgtgctcaaggagggcctgccgcaggtctacccgccctatctcaactacctgaggtgagggcccgggacggggcacgcccagcgcgtccgggagtagcggttccgttggcggcggcggccgccaaccctcagccccagccccagcgcaccgctgcgctccccggggcggccggagagggtgggcagcgggacacagcacaggggcagttgcctcccttcttcttccctcctctcctcactcttggggacacgaaggtgggcgcagaatatactatttttggggcgtgcctccctgaaagctgtttttttgtttgttttttaactttccgaatcttccagattccgaagcagaaccaaccccgatttaaaacgtgcagcgtcacactaggtccgctgtagcccagtggggcagaaagtgcgcggcgagttgggggctttatgaaatgcttctttcttagaagaaggacgtttaccaggagtgcttgtcttggagaggagttaaggcaccgttcccccgggaggggtgggacttgagaggtggccggccagaaccgaaagcagcaccatcttagggatttgaacacttcagtggctcagttttcttaagaatctcaagattaaaattaagttcacgtgggaaatgtttaaactgtggatttaaacgcctgtcactgcattgcaccgttttcttattattgcttgctattcactacaattttttttatatacaggtttaaaaaacactactttgcatactgaagtaatggaatgtaaaaaaagaatgctctgtttggaatcttatgttgtgaataggcaaaacagtgtcagtgtattggacaatactttaaaatgacaaacatatacttgcttaagtaagcaatgattacagggttgtgttttaaaaactcaaaaccaaaacattgcaaagtaccatcgaacttttaaagccaaaccatatttgttttgacccagcatacagacaggaaggacataacatttcatttgtcaaagactaaattgtttctatataaagagttttgtagaaagatttccttttaaccgactttaactttctaggacataatattatacactaattattgttcttttatattggtgctactgatgaatggctaatcatttgcaagtatggtgaatccagttacggatagtctattaccaagtttagtttgcatgtctttcaagtgtatatatacagttctgtttttaaaatctcctttcaccctgttaatactggtttaagaaacctttagtattagatagtggtgcacttaaaaataaatggagtactttgttttgcatttcaagg

SEQ ID NO: 39 - DNA, 7110 bp, Homo Sapiens
tgttttttgtgatgccttagaggccagaaggatgttttgaaggggaaaattgtaggagttaggcagagcagggttttggctccttctcaatgtccctctacctagacaaattcgggctattctgcagaggttgcagtgagccatgatcacgtcactgcactccagcctgaggaacagagggagactccgtctcaaaaaaaaaaaaaaaaaaaaaaaaaaaaaaaaaaaaaatttcggcctactctatgaagcacctggtaggtgtcccaatattttctggtatatgggaattacctttttctattattggaaggtctaaaaagcaaacaatgtgctccatatggctagagttagtattaaggggaccaagtagaataattggtagctagtgttagcctggagactaacatagtcaaagctgtcttgtcatgttatgtcttttttatttgtattgctccacggtccaagacaaaatttctgaacgccacttggacacagtgagtacctggtctgctctattgttctcaggagcaaccaactcaacccttatttctctgagaatgatgatttcatacagcacatctctctaccaagatgtgaaagatgacaccatggcatctgaaatagcttcaggagagatttgggacatgggaagcttgtagacaataatggaaaattctcttttagaatatagttacttgtatgacccacagtagcgccttttggagaatgtcttaaaattatctttattgaaagaacaataatgtttgttattaggataaatgaaataaggggaaaacctcagacccttggaacaatgggtttacattcaatccaatgattattatgtttttatattctgtattatttagaaaacagtagttaaacagacagaaatacagaagattgtttaaaaattaaagctattgagttagatccctttttgaaaggtcagcgtatgggagatgagaaaggcactatagagatcagagtgtttacacaaaagacatcttagcagatgacctacaaagagcacatcaagtatttatatcatccacatcaagttgctggtcatttcgcttatcaaagaaaataagaaagaaattttctttcgacattattttggtgtagtaacaatagagttttggaatcagctgttagaagcgataattaaagctagtttaccatgcttactaatcaatctacatagtcaccctgaagctttatataattgtccctttgttacaagcttctacttctccctatggtattctggttctgaatccagacaggtaaagaactaagtatggccgggcgcggtggctcacgcctgtaatcccagcactttgggaggccgtggcgggcagatcacgaggtcaggagatcgagaccatcctgaccaacatggtgaaaccctgtctttactaaactacaaaaaattagcccggcatgatggtgtgcgcctgtagtcccagctactcgggaggctgaggcaggggaattgcttgaacctgggaggcagaggttgcagtgaaccgagatcatgccactgcactccagcctgtgagactccgtctcaaaaaaaaaaaaaaaaaaagaaaaaaaaaaaaagaactgaagtgcttggagaccagtgtattgtaatatctatacagccaagcaggtattttcaactgaactttaaaaaagtactatttttgaaactttctttagtttagatagggccagccatttgggtagaaaggaaaagaaaaacaaaaaattggaaaaggatgcatcagtatttctttcagaaacaacttaacactaggaacagaaggaggattttattcaccaactcctaataaccacctgatgttgctgttgggctggccaaatatctgccaacattgatgatcctttcattcaccactagagagaagtagagggacctgatgtttagagaagcagtaaaacccatttcccattttctttcttcagccggatggaagtacttggaggctggtctcatattctagcactttagtgctggtgatgcagattatctctgctccagagtaactctgtgccatggaatccaagaggattctgtcgcaccaggacaggaatgcacccttgtttcatttgcttccatgaaagcagatttcagagattctcagatgctatgagactaattgtcacttagggtaggctccaggggagggacagagaagggcagtgctaataacagggactctggagacaagatcagcaatctaagaaacaaatgtgagacattttacccctccctaatctactccccttttaaaagttcatcttcattttccctttttctaccacgcagtaattgataattaaacacagctctggtttttaccatgcaatctagtagaacacctagacatcaggaactccttatctttggttatttatacaataatgaaatctgtagttcacgctaggctgtgtggacagtatctgcatctctggaaatcaactggaggcctttctcttactcttttccggttgctttccatttccttttccactgtggtccttgcctttcccaagctgaccagaactatgcacaaaaccagtcttcaataaatatcaacactgaagcttcagcaggttgttaactcctgcacagctatcttaaatgctgtatataagtgcaaagttttatggagcctcagaggtctctaagaacactgtaaatatcccaggtttaattagtagtcccggagttaggtaatggcctgtggctttctgcgctaggtctcttgaggtttctagtcttcagaggttgcctgcaactatgatgtgcacatatacagtactctttctcaaatacagcataaaccctctttagactttgctaggcacttacaattattgaacacacatgcagattgattctcattctctcaaagtttgaaaaacaactcagtgcttcaacctaggtctcgttagatattttttgactcaaattgtcgtctgtagttctacttcctaagggaaatgaaaaaacaataaattcccagactggtgttgatgctcattctctttaagcgggtcgactacttgctttgtagatccttgacgggtggggtgcggggtaggagtgcgatccaactctcagcatttccgaatcagctctctcacggtgacaggtcagcccaatcggggctgtaaacagacttgacaggtttgttctgggctgacggccattgactaggttctcagaccagataagtcacttggctgagtccacagtaggtggggcgcgctcaccagctcaggggtagtgactggacgtttgttgcaacatcggagaatgcacgctctgggctgcagcaggagataccctcaagcacagaaccaaaagggttcaccctaagcggcagggcatcagcgatggagaggcccgagagccctagcgcccagctccttttcccacgtttgggaaggcgcagaataggtcgatgtagagcaaggagtgagtctcaggtctcagtcctttggcttgctcttagggtagcaggcgaggagtggcaccagtttggggactctctccccgcgttctgtaagaatcggcggcagccagcaggcggggaggcgggggcacgtgtttggatgtgggtgcttgtgtaaccagttccccaagcgccagccccgacagcgctccttcgggaggctggtccgagcccctgtttccgccgcggcgcaggaagggttggggttccgctgcctgcaccaggcaagagcaccccgagcaaaggaagaagacgacttgcctccggagctatcactggggagtgggaatttggaaagttccccaactagggacacacgtgacctccttcggaaagtagttccgactgtggcccgtgtatccttccacctccttttgaaccctcctaggtctcctcgccccgcccactcgctgggctgcagcttcctaccgttccgtactttccactcaacccggtaaccccaaacgtgcacggtccggccggggcgcgcggagcctggccccgggcgatccatcctgccgggttttcacggcggccaagggggggcggggctaggtggtctctgagaaccgagcttgactccgacgccgcgaaccgacctggagcccgaggggaaagatgctcgactctcttgggggcaccggagcgggcgcaggagaggcctgcggggtgcgtcccactcacagggatcctctttcagttcatttagataggtgccctttgggcccttgaaattcaacggctatgtgttcacgttcagcacgctcggctgagagctttcatttttagggcaaacgagccgagttaccggggaagcgagaggtggggcgctgcaagggagccggatgaggtgatacacgctggcgacacaatagcaggttgctctttgtgctaagactgacaccatgaggacacagatttgggggaagggggaatctctaggcaaaggctgttacagtcaaatctctgcgaacgattgtgatccgacagcggtgcaaaaggaaagagcgaatgcagtccacgccgcggaaatctaggggtagaggcaaggggggagggtattccccttgcagggaccgtccctgcatttccctctacactgagcagcgtggtcacctggtccttttcacctgtgcacaggtaacctcagactcgagtcagtgacactgctcaacgcacccatctcagctttcatcatcagtcctccacccccgccccacaacagcctaccctgcctccggctgggtttctgggcagaggccgaggcttagctcgttatcctcgcctcgcgttgctgcaaaagccgcagcaagtgcagctgcaggctggcggctgggaaccggcccgagcaagccccaggcagctacactgggcatgctcagtagagcctgcggcttggggactctgcgctcgcacccagagctaccgctctgccccctcctaccgccccctgccctgccctgccctcccctcgcccggcgcggtcccgtccgcctctcgctcgcctcccgcctcccctcggtcttccgaggcgcccgggctcccggcgcggcggcggagggggcgggcaggccggcgggcggtgatgtggcgggactctttatgcgctgcggcaggatacgcgctcggcgctgggacgcgactgcgctcagttctctcctctcggaagctgcagccatgatggaagtttgagagttgagccgctgtgaggcgaggccgggctcaggcgagggagatgagagacggcggcggccgcggcccggagcccctctcagcgcctgtgagcagccgcgggggcagcgccctcggggagccggccggcctgcggcggcggcagcggcggcgtttctcgcctcctcttcgtcttttctaaccgtgcagcctcttcctcggcttctcctgaaagggaaggtggaagccgtgggctcgggcgggagccggctgaggcgcggcggcggcggcggcacctcccgctcctggagcgggggggagaagcggcggcggcggcggccgcggcggctgcagctccagggagggggtctgagtcgcctgtcaccatttccagggctgggaacgccggagagttggtctctccccttctactgcctccaacacggcggcggcggcggcggcacatccagggacccgggccggttttaaacctcccgtccgccgccgccgcaccccccgtggcccgggctccggaggccgccggcggaggcagccgttcggaggattattcgtcttctccccattccgctgccgccgctgccaggcctctggctgctgaggagaagcaggcccagtcgctgcaaccatccagcagccgccgcagcagccattacccggctgcggtccagagccaagcggcggcagagcgaggggcatcagctaccgccaagtccagagccatttccatcctgcagaagaagccccgccaccagcagcttctgccatctctctcctcctttttcttcagccacaggctcccagacatgacagccatcatcaaagagatcgttagcagaaacaaaaggagatatcaagaggatggattcgacttagacttgacctgtatccatttctgcggctgctcctctttacctttctgtcactctcttagaacgtgggagtagacggatgcgaaaatgtccgtagtttgggtgactataacatttaaccctggtcaggttgctaggtcatatattttgtgtttcctttctgtgtattcaacctagggtgtgtttggctagacggaactcttgcctggttgcaagtgtcaagccaccgattgctttcttaggctatctatatggtctcttcctgagggctattgtccgttaatacagaatacagtacactgttagtggattagcgagctcggtaatccggtctcctaaatgaacaaaaaagtagacgctttttgaggttgagcatatttcgattaaatcttggcttaggccctagatcaagggtttagatcagaataaaatgaaaattagtgttgcacgtacgcatattgcatcagaatcttgcagtgattgttttagtttcctgagttgcattgatagattcttttaaaatatgactgatttgcataactttagaagcagaatcattttcagtatatatggtgcacattgagggcaaaaagtagttttgttaatgtttaaacttaagttacctacaactttgaactgtatgtagaagttttgtagtttgaagtcaatagtgccataatataccttataaggcgttcttactagatctttgttatatttacctttttctctccctatggggtgatgtaggatagtgcttgaaatttgcacttcagtagcatttaatgttcagtgctcttgtcataaacatagaatggatattgagtagtttctgatcccagatggtaatgtgtaggttcaagggtattgtgtgtagcaagtgaagattgcagaaataaaacttcagttcatgcttgaaatttaagtattgttgtgatgccagaattgctgctcaccgtttttaggtttcaggtcctctgacaccttttggtatcgttaattttactgatttg

SEQ ID NO: 40 - DNA, 6478 bp, Homo Sapiens
tttattttgaagggatgttcaagaaatattgctaaatttaaaagtgttgcagagcaatatgtatcataagaccatactggtataatagcaacaaacagcacccccccacacaatcccaaaaaaatatacagatctatgccaagcaccagttaagatgcctggcacatggtaggtattcaacatttaatgaatacatgtagaggacttttacttttcactttatatcttttggacaagactttgaatttttatgagcatgtattacttaaatctagatttatagggagtgatggaaaatgtgaaaataaaattttaaaaaggaaaagaaagagtaaagatctagatttaaaaaaggaaatgtaaacaagatgaaatagccaaagataggtctccccaaaactaatgttgagacaatgccaccagcagtgacagtcagctaagagatggttcgcagctcactgctcagtactgaggcattcagcaggggttgtatttaactttcaagttggaaccaaccgaaactgttgggcttgaagagctgtctttatgagtcatcgacggcagaaagcacagaagcactaaagaaaataattcagaaatgtggaaagagaaaagtatgcccttgtcttgggagaacaatatttgtgtgtaaccaagtaggaagactttgtggaggaaagtctgaaaaagcagagagctgaagagaaaagagccaaatgaaggacacggtggccaacactcaaagtaaaaagacatttttgaagaagatgtgtttctagggtttctaagaagtcgctatactcatgcccagagccaccttgcaagttcatttggaaagtgcattggtgtcttttggtataagatccacgaacatcaacagtcctgttatgtgagcaggtgttcatactgaagggccacaagcaaagtttccatgtgttattactgttagaacttcccccgctcccttccaacacaaaagcagctctgcctgctagtatggaagccctgggaagagcctcatacttgcctcgtgctgccaacatctctgccttggcttccctgctggaacacacaagtcactcagtactagccatttattcttctggcagaactgtggcaagaggggattaacagggaaaaaaaattaaaaaacaaacaaaaagccaaaacaacatgaaagagctgggcatgtctttaaaacaatcagtgtccacctcccccagccctgtgcctgtgtctgcctgcactttgcatgtctgcccctgtggtggggggggatatgtctgcgcctctgaaaatcttcttatttagacatcacaaggtattagcccaattttgaacacagccggctgcagtacggtgcacagacacgactgctctttcttcagaaaactctccagttcaaacatgtttgcagagcatgattcatggtgtttctttctggattgtccagtgggtaattgctgtacgaaaaccagagaaacagatgtagaccctgaaccctggctataaatttttgttttatgattatgggtttcaaatgtgctgtgtcacactgacaaatatacagttactctgaaacaaaatggattttactctcaaagttttgctttttgtttttcactttttgtttgcttgttggttggaaatacatttattagatcattgatcaaacacaaagaaaatagagatgacacatatcagaatgttattttatgccataacaagaagatatttgggaaagtttcttccaaccctgtggctaatgtttaaaatgggtgtcagtagtttacatttcattacggacaaatcggtctatttttcactttctaccctactcattaatctttatagtgcacggatctgtatttaaagaattatggcttatttatgtatctttccttcattttacttaaaatgaagaatttggagacagaatcaagttttcaagaagtgtaagcatttactgatgaagaaataattagcatgtggctaaatcatgggtctgttttataaattaatacttggattaagtaatagctctaattattgctatcagcataattaattcatgatgaggaatgattaattgactagcgaatattgtcatattataagaaacccatactattcctttcatggggatttaaatactgattattcatttcaaggcccaagttcatttctcagttgagaacttcaaggtaattatatattttacattttcttgcacaaagaaagaaaacatcgagtcgcccaacctttaccacacacagagagagacacactaatgttgttatttttgtgcaatgatacagtatagaggtaagaaattcggaagcagtggtctcgctcaatgaggctgattccatagcttaagaaatgagaatgaacagaattttgaggacacccatccccatcttcacttccctgggaccagtgcatctctactctttggagagatgttaagcaagaatgtgcagcagcctcccctggataacagatccctgtacacacatacctgtcagtgatgccatgtttctcatctctaacttaagtttctcctgctctacttccaatatagctgtttcctcttctcttgtctaacaacttttcatccacctccactgtccggtaaaaatgaactcagtttccaaggaactctaaggaccttaaataagcatttggagccataagcctcatggaccaagtagaaattggcacataatgtagtgctttgtgtatctttacaactaccttaatgacagtgtgttaaatgttttgtaaattcctctgtgttctcttgcttaaaatgtgtgttttctttgtagttaaagggtttcttacaataagtctctgttacaaaatgatggccatataaaagagagaagagaggcgcaaaaataacaaacacagattcagcaaaaatctcacccctttattgccctgaacttttcaatagcaagaactgagcttgctgggctgaaaattgttttaatgtaccttcataaaaggatctttgacttggtaagtgtgtgcgatgcatacttttcatgttacaccacaagtgccacttagcaactccactagacagggcagtgtttcagcatggggtggggtgccccctgacaggcttttaaaaggcccggatgccaatgcacattccaacactatccacaaaaaggagactggagcagtgctcttccctgcattgggcaaggagactctccctccctgcctaaccacttgcctgccctgttttgtgggagaattacaagtaaatgctacagaggcagtggagaaaaaagggtgttttaattcctctccagagtttcctttatttgatgtatgttgcatcctttaaacaagttgtgcaaaatggctgcagggtagattggctctcccttttaaagctctccatccggctgggtttatttgtaaatactgcatctatccttcttagtgttttaggactggctggaaagactcttcttcctgtaggttgggtcagtgtgagagatctaaaaaatcattttcccttaaaattactgtattttaataaaaggattgggcaggggctggaatgagagaaaactggtccttcaaaatgtaaaactgtcatacttaaaccagtttacaaaatatgcgtttaattatgtggtgggatgtgtgtaggtgtatgatgagagaggcaaccaacatggctatttggggtgcaaggatgtgggaacaggcaagtaattttcacattggactttcatcctagggagctgggttctagtcacagctctgagctgtgtgaccttgggtaggtctcatctccccggggttttgtttcaccagttgaacagtatgaggatgagtcacagctaacatttgttccatgatatttacccagcaccatacaagtgttatttctgtcctcccagttaacactgacgtgggtagtattatatgcccattttacagatgaggaaactgaagcctgaagaagttaaatacttatcccagaacacacagctggtaagtggcagacctggaattggaatctagttcagtttgattccccaacccatgctcttgaccactatactgttttttcaagtccagatctgaaatctcattttctgtgtggctgtgtgtttgggacaggggtaaccaattcctgactactctatatgctgcatagaacctggagaggatttttcaaagtaaatgaatctcgaaagctggattgcagagcaaacgagtgcagtcaattcagccaggggcttgcaagagggagaaagagaaaaagactgtggaatggaaagtttcccaacccaagcctttcccaaggggtagccattctctgttctacagtttagggcttgcatgtgctttttctggagtggaaaaatacataagttataaggaatttaacagacagaaaggcgcacagaggaatttaaagtgtgggctggggggcgaggcggtgggcgggaggcgagcgggcgcaggcggaacaccgttttccaagctaagccgccgcaaataaaaaggcgtaaagggagagaagttggtgctcaacgtgagccaggagcagcgtcccggctcctcccctgctcattttaaaagcacttcttgtattgtttttaaggtgagaaataggaaagaaaacgccggcttgtgcgctcgctgcctgcctctctggctgtctgcttttgcagggctgctgggagtttttaagctctgtgagaatcctgggagttggtgatgtcagactagttgggtcatttgaaggttagcagcccgggtagggttcaccgaaagttcactcgcatatattaggcaattcaatctttcattctgtgtgacagaagtagtaggaagtgagctgttcagaggcaggagggtctattctttgccaaaggggggaccagaattcccccatgcgagctgtttgaggactgggatgccgagaacgcgagcgatccgagcagggtttgtctgggcaccgtcggggtaggatccggaacgcattcggaaggctttttgcaagcatttacttggaaggagaacttgggatctttctgggaaccccccgccccggctggattggccgagcaagcctggaaaatggtaaatgatcatttggatcaattacaggcttttagctggcttgtctgtcataattcatgattcggggctgggaaaaagaccaacagcctacgtgccaaaaaaggggcagagtttgatggagttgggtggacttttctatgccatttgcctccacacctagaggataagcacttttgcagacattcagtgcaagggagatcatgtttgactgtatggatgttctgtcagtgagtcctgggcaaatcctggatttctacactgcgagtccgtcttcctgcatgctccaggagaaagctctcaaagcatgcttcagtggattgacccaaaccgaatggcagcatcggcacactgctcaatgtaggtttatttttttcccttcttctaccaagaaaaaaaaaattgtctctcttgcatgcaataaagacgttggaaataaactgcattggtagcaagacaaaggatttaatgatttaatgctgaaggggtgtgatatgctggcatgcatattgattccctttgctgaaaatttcctgttagatgttttcttcccaaataacccctcccgcccccatgctcctctccttaccaaccttatagtctcttgaaaacagtttttaaaatatgcataaaaatgtggggggtggggagtagagggtgaccacaagactttaaaacattcttcaagtagggcaatttgacacattttgcagtttttactaaaatgtatgcagagtggaatttaactttgctgttctttggattagctactagttgtataggtccccccaccccttgtgtattccaacagtccaaagtaattaaaatatgacattttccttgaaaggaatttagtttaattaaggtggctgctgctcccgaagttcataaaccaccagttcaagctgccgcttccaatgttttccttgctaaggaaaggcaatatttcttagcattgaccctgctgccacctttccaagtcactttgttggtctaagaagttgctgttttgctagaaaactactggcaatgaacaccccttggactgagccatccattatttccatatcttgcagttcagcccggaacgtggacatcagttaaaggaaaggaaatataagtggggtagcccaatttaaaaaaaaaatattgactattttgttatctgatgctgacacagtgccgaggtacgcacctggtcaacagtagcctggctgcaggcttgagaaatgatcaggagtcccagaaaatcccaccttcgggtggctgtagtgggagcctgcaggatgcttcgccgccctgacagtgatttagataaatggctcagctatctatcaaaatgtttttagtactttatttg

SEQ ID NO: 41 - DNA, 2534 bp, Homo Sapiens
aggcaggaaagtgggacagccggggagctggaccccaccctctgtgagccccgctggtacctgatggcatgtggcttggagagggcaggtgacctggcgtggagggccagagggtaaatcctcaaacaagtggcaacaggccaccaacttgaaagggaaaattgtgtagtgatgggaaatgtgtccaacaaacctactgggtgactaattacaaaggctgggctggagcttcagaggctgcttgttaaacacttcattaagcggcactctgaaagctgccacctgcgcattctgggagctcagaggggaccctgagggggaatgaggcctggaggatggaaccatcttcaggtagactgagaaggagcctggatctcacttccaaacacagtctggagctcataggtcagaggcctcaatgggagaaaagctaaaggaagagggtgcagaaaggagtttcagggaattggtggctatgtgactttgagcaaatctcacccctctctgagacttagtgttcccatctctatggtcctgtgtgtgtcacagagacatggtggggattaaattcgatcgtgatatgaaagtgcttgggaaactccatggccctacctaaacatgagttatcctcacctgaaccaaggggggaagttacctggcaggattaggaaccccatcctcctgaacctttatgggctctgtcgaggctgaagcagccaggggctaaagccagtccttagcccctggaagggcactgtgaaagtggatctgatttgagaagccgtttcctgatgtgggcagccatgtgatgccagccccgaacaagagggggcagcctggagcctggaaaggtgccagtgcaggtggggcccacgcccagatttctcctgctgactgttctgatgattcacccccacatcccagcctttttacctttactgcagagccggaaagggtgtggggaagagaggagagggaggcaggtcttgggccctggtcccgccccctgctcctccccacccttctctgggcctggccacccagccaaaaggcaggccaagagcaggagagacacagagtccggcattggtcccaggcagcagttagcccgccgcccgcctgtgtgtccccagagccatggagagagccagtctgatccagaaggccaagctggcagagcaggccgaacgctatgaggacatggcagccttcatgaaaggcgccgtggagaagggcgaggagctctcctgcgaagagcgaaacctgctctcagtagcctataagaacgtggtgggcggccagagggctgcctggagggtgctgtccagtattgagcagaaaagcaacgaggagggctcggaggagaaggggcccgaggtgcgtgagtaccgggagaaggtggagactgagctccagggcgtgtgcgacaccgtgctgggcctgctggacagccacctcatcaaggaggccggggacgccgagagccgggtcttctacctgaagatgaagggtgactactaccgctacctggccgaggtggccaccggtgacgacaagaagcgcatcattgactcagcccggtcagcctaccaggaggccatggacatcagcaagaaggagatgccgcccaccaaccccatccgcctgggcctggccctgaacttttccgtcttccactacgagatcgccaacagccccgaggaggccatctctctggccaagaccactttcgacgaggccatggctgatctgcacaccctcagcgaggactcctacaaagacagcaccctcatcatgcagctgctgcgagacaacctgacactgtggacggccgacaacgccggggaagaggggggcgaggctccccaggagccccagagctgagtgttgcccgccaccgccccgccctgccccctccagtcccccaccctgccgagaggactagtatggggtgggaggccccacccttctcccctaggcgctgttcttgctccaaagggctccgtggagagggactggcagagctgaggccacctggggctggggatcccactcttcttgcagctgttgagcgcacctaaccactggtcatgcccccacccctgctctccgcacccgcttcctcccgaccccaggaccaggctacttctcccctcctcttgcctccctcctgcccctgctgcctctgatcgtaggaattgaggagtgtcccgccttgtggctgagaactggacagtggcaggggctggagatgggtgtgtgtgtgtgtgtgtgtgtgtgtgtgtgcgcgcgcgccagtgcaagaccgagactgagggaaagcatgtctgctgggtgtgaccatgtttcctctcaataaagttcccctgtgacactcctcctgtctctcttccagttcttggcgatgggctgggagtgggactggaatctgacttagagaccctgactttggacctctgagttagggccctgaactccctaggtggctcagtggcccgcacgcaagactttgagtccaggtgaggccggggtcc

SEQ ID NO: 42 - DNA, 6558 bp, Homo Sapiens
caagatcataaattgcttctcatcagtggggaaggctccaaacattatgcatctagcataagtaggtgtaaccaaccgtaacggcctgtcctgttactcccgattaacacacaattatcaggttagaactgcattccacaagtctcttgcgttcagttatcctgcatatattaattctcccaagctttgtgctttaaaagaactgtacagtgctgggaagttctttacccattccaatccttagggtaccgagctcgaattcgaatcaggtatcaggcatgctccatcaccacaaaagatgcaaaaagatgcgcacagtggcgcacacctatagccccagttactgaggaggttaatgtgggaggatcacatgaggctgcagtgagctgtgatggtgccactgtactccagccttggcgacagtgagtctatgtctcaaataagtaagtaaacaaaaattaaaaagaatccagtccacagggcatttgaaggcaagaggaaaagatgccagaatcagagatggggagaagatgggcttctggcgcctgctgaggttgagaaatgagacagataggctgagtgtggggtggagagaggatgggcagagagactgaggctggtctgaatggaaatgaaatgttagggctctcagggttatcggggaataattggagcttctaggaaaggtttaacgttgtgaccacctgtgttcgtcatgcctccccaccccttactaattgtgtgaatttggcagactttgagtctcagtgttctcctctgtgaagtggggtcatcttattccaactcctgggattgttgtgtgaattaaatggggtaatgtacggagagcacctgacgcacagcgagtgcttcaaaatttcagtctgcaccccccagcaaaggatatgcacacgcccattgtgagtgacaaatccaggatgacctgaacccaatgtgataacgtgggtcctcgcatgctggtcatgctgccgggagacacttatggatccaattagtacaacaggggaaataaattatttaatgcattttgctaagacagaatacctcagaacttattttgtggggcggggcataataaagggggtccttctgctgaaaacgtttaagctcaggttcgtggcaccactcaaccaaggtcgacagtcacacagtaagccagaggcaatgtcaggacttaaactaaacctgtggcccccacaatgaggccatttctctttcccctgaacggcctggggaaagggggtgggtgggcagaacttggcagtggccaatccctcacttctgtcccctggttttctcctgcccttatctctaggcttgcattgattgattgattgagacagggtcttgctctgtcgtccaggctggagtgcagtggcacgatcatggctcactgcagcctcaaactcctaggctcaagtggtctttccgcctcctatctcccgagtacccatatccctaggcttttaaaatggcttccaggtatctggctgccgtctcagacatccacctgggcttctgggcagggactgtccgggaaacctcatctatgtgaagcaggtgtgggtgtaggaaggccgcttggaaatgaatcagcactgtctcctgtttgagtcgtaagcagggcgccagagggtctggcggacaagaaagggaggatgacaggaggccggcactgcaatgacacgccttagccaccagagggcacgaagcagctgggcaaaatcccgcggggccgctggtggaaaatttctggcacctggagcccggagatggggtggacggaatgtgaggacccagcttcctgaggctgggccggggcagagtcactgctttggatgtccgcagggcctgcttgtgtcttgactactctgcctttgtagacagctggagaatgtgagagtgggattgggatcggactctaggggccattccgtacaactctcctgccctgccgtgggggagggagttgcccaaggttacgcagcaagttagtggcaaatgaatacgattatcaccagtctcaggtatatggccatttgatgggcgcagtcgcagcctcagttcctgagacagagacacctgattaaggacaggccttcaggagctgaccctagtgacccgcggctctgctgctgtctctgtttttctccctggcttttccatctgactgactctttgtcttcttcgtctgcctgcctgtctccgtctctgcccgctggggggtttgctcaactccctcactgggtcctgggagccgcagtttcctgctgtcactcctcagggatttgtagctctctgaagctcttttccgacccgttgtctcggttccactcttgggatccagaggagaggtgattatttcgtagcatagtcagtggtgtgatttcacggggtgagaaggactcccttgctcctaagcactcctccagtgacccctgttgccatgtggtagccgtaagcactggttggcacctggtgtgggcgagacccttacctcatgcagaaatgagtaagaccggtgagctcaccatgtgggggtgaggctgagagaaaacaagtacacaggtgattcagtcaaaatcagaattctctaagtacacacgaaaagggcaaaaggggcgctttgtacaggacagaacaggtagacactgaatccggttgggccctgggaaggctccctgcagtggcctttgaagggggggttggatttcagcaggatagagggcatgggcatgtgtgggcacgttctgaacagaggggtcagcgcaagccgagggtcttggccacactagttgcatgtgccggtgtgtttaagggacacgcagcagcaggccgagtctggagcgcctcactgccaggctttttaaaaatttttaattttaatttaattttattttatttttactttaagttctggcatacatgtgcagaatgtggtttgttacataggtatacatgtgccatggtggtttgctgcacctatcaacccatcatctaggttttaagccccgcatgcatcaggtattagtcctaatgctctccctccccttgcccccatccttctccccgcaactgcccacaggccctggtatgtggtgttcccttccctgtgtccatatgttctcattgttcaactcccacttatgagtgagaacataccgcctggctttaagggacagccatggggatgcactgcagtttctgagcagggaaggccctgtggaggcccttagttaaaaggaaagaatggctgtgaaaatcgatgcattgcgctcccttgtccctcaccctcagtgtgaagggtttttattccgagttctacttgaagtaggcctcgatgggaagacaagtagcatgaggggttcaagtactgaggggagcaagggacactcggtggctgtgccaaggtgtagaagaggacactgggggccccaaggcctgacttcatgtacactgctcaggctggcccccaagtcacacggtgaccgctaggaagggaccagcctgttctcagtctgatcctcctgccatgtcattatccaaagctcctcctggcagggcctgtttggggtctctgtgccagtgctttccctgccaggctgggctggggcttccacctactgctctgggactgctgctgccctggccctgggggaggagggtgtgccgctgagtcactgcctgggcatctgggcctggaacctcgggtgagtcacttagggctgaggtagaggggctgggggaggggaagaagctactcgacagctggagcagggaggggagctggggccacaggaagggcggtgccctgatgcccagacgggccgggatagacaaagggccaaggaggaaggggccctgggagggggcagccctcccttgggctgggctctgaatggccacagtgtttgcctttctccgggtctggggaggacatgtgtgtggggggcagtgagagagggctgtggctgagggctgtgcttcaggcctggattctggcttgggaagctgtccagctggtgttttcagccttgggtagggatgtacccctacccacccacccagccctcaagctggagaagaggaggccaaagttttcctgttcagcctttaactactcgggacttccttatgctccccacagactgtggcccagcccaactgcggctgtgtgtagagcaaccccatttctcactgcttccccatccttccagacaccttcctacacagagggaccttcccaggtatttctaagcacacttagttacctcattacctcattaagaggtattctggtgctggccattaaaagtcactccacttcatccatgccctgaagtcagtcctgtccttctcctcctgatgtcccccagctgcctcctctggcccccagcttcctaagggtggccccaggttgcttctctctcacacacacaggcgcatgtatgtacacgagcactggaccatgaagtctcagcgtgtgctcacagcctctcacacaggagtgggctgtgactcacaggcatgtcatgagaatgaggcctggcaccagtctccaggccccagagcaggggttgcctcccctcaccccggtccaggatgcccagtccccacgacacctcccacttcccactgtggcctgggtgggctcaggggctgcccttgacctggcctagagccctcccccagctggtggtggagctggcactctctgggagggagggggctgggagggaatgagtgggaatggcaagaggccagggtttggtgggatcaggttgaggcaggtttggtttccttaaaatgccaagttgggggccagtggggcccacatataaatcctcaccctgggagcctggctgccttgctctccttcctgggtctgtctctgccacctggtctggtgagtacctctgtcctgctgagggcagggtggggaggatccccgtgggtctctgtctttgtctccacagttctctcattccagcttccctggtgggatcaacctgggcctctctgggccttcccccttggaagaactctctgtgaagtgctgaagtgttgactgaagggttttttttttttttttttttttttgagatggagtctcgctctgtcgcccaggctggagtacagtggtgtgatctcagctcactgcaaactccccctcccaggttcacgccattctcctgcctcagcctcccgagtagctgggactgcaggcgcccaccaccatgcccggctaatttttttgtatttttagtagagatggggtttcaccatgttagccaggatggtctcgatctcctgatctcgtgatccacccatctcggcctcccaaagtgctgggattacaggagtaagccaccgcgcccggccgactgaagggtttttctccaggttcctctgtgaggtctcagtgcaggggttgctctgaggccctcccctggatatctcagtctaggggcccttctttgggggtctaggcctaggagcaggaggtgtgcatgtgggcgttgctgcaaaaagaatcctgagatttttttttttttttttttttttttttgcaaagtcctggattctagcaggactaaggtgcaagaggcaggggtctcaagactctgcctgggtcatggccccaagcagcaaagctctgccccctgcctcggtgaaggcagggctggcatgatgggcccagggcatgccctgcctctggcatagctcctctggcctcaccctgaaacctgcctaacctttccaggctggtctgagtattctcagaggccttgccgctgaggtctgtcccatcctgatcccaaggcaatgaacatttcatatctttaattctaattccaacaggatccttcctggtggagagaatgttaagttgcccccaccctatccatgcccctgtctgcctagaggctcaggggccttcagggtgaggggagacacattccccaccctctgggagctcctagtctgagagaggaaacactcctgcccaagggagcttccagttagatggcagagagagatgcctctggcttcaggagtcccgagtctaaggagggaaacgactccttcagggagcttcctgctcctaggctgtagccatggctcctgccagactgcacaggagcccccatctgccagccggtgcatgtggccctgctccccagagcctgcgcagatgccatcaaaatgggactctggtcaccctgtcatttcccttctggcagacactaaaatggggagccctgccctcaggggggtgtcccaagtgccatcagaggaggcttggtgactcccagacacaagggaagctttagcgtctgccctcagggtgagatggaggtatcgcctccggcctcagggaaccacagtctgagggggagatgcagcccctgccttcccattcagagaggggttttgtgaggtggcttgggggcatagggcagaagtggatcctacaggctgagctaaggccccaagagcctcagcagtgtacccatcacctggcacctctgcagc

SEQ ID NO: 43 - DNA, 6432 bp, Homo Sapiens
caccacgctcagctaattttcgtatttttagtagagacagggtttcacaatgttggtcaggctggtctcgaaatcctgacctcatgatctgcctgcctcggcctcccaaagtgctggaattacaggcataagccagcatgcccggcccatattctttaactgtatgtacaatttaatttgtagatgatcctaaaagtctaaattggagtcctactgtcttcctcatcttcagcccccataacaaacctcatgatagtttttgtctataagaacccctttgtagttttaccacctgcaaattatttaaccttgcttttccgtgattcctcacccttcacatcccttatatctcttagctattgcctcaaaaattctggataacaaaccaacccaaatttttccttaaacggcatttacttattcttactcagactcatatggattggctagaggtaggcttgagattggctgatggaggtctggcttagattcaatcaggaggttggtccacatctgttccacatgtctctcctcctccctgcatttgctggtctttaagtgccttcaactgaaaataatcagtataccaaagcagcatattttggagtggcatttcctgaaatccttcactggtcaggtggcgaagatcaaccacctgatcaatttgttctagagtgtagaacaagtctggaactagacaggactaagttcaaatctgggctctgtcttttactagctatgtgacctttgtcaaatacttaatctctttaatcctcaaattcttcatttgtaaagggaagattagaatagtactgcaaggacatgctccaaaatttaacaaggattatctttggataatagggttaagaatccttttaaagtctgcctttaaaaaaaaaatctaaatttcctacctataattaacacgtattacccttgtaattttcaaaaagttatttttttcaaaacatactattgatgctttctgtaaacatgtggcataattgcaggttctattaatatctgtgaagaactgcaaacaagagaatggattaggaaaactgatattcttatttttctctctattgaagacaagaaacacacactgaatactgattatctgtagagcacggagtgtggttctacattgaaaaaggaatattttgtgcttttaagggctttacaatcattagggtagaattctaaaaagcaaataaataacaataatgtactccatgttagaatggggcaaacatttttttttaaaaaaaggctaaataaacgaaatgttccctgggttatccctgggaaaggagtgatcacagtaggtgaagcatcacaaaatatttcctggaggaggtagcatcatggatgacccacaaagggtggatgaccctcacaaattaactacagtctcagtgcttattggtttgcttcacaataaaaggaaaattggtcaagagataagagctgagaatgaggctggttaatttataaggagaggaatctccctgttaactgctctagctgacagtaacctcaacagctgcatgtcacaaagctcaggggagtaggaagttcttctctcatcacaactgagaaacccaacgtttaaataaaccacaatttgattcagttcaattgtgtgtgtttgtgtgtgcgtgcagagtttaaaaagctggtaaaatagattgtcagcttttaaaatttctgttcaagttgatatttattgtttttcaactcattaagggcttaaacgttaccttccttgttttttaaaccctgagtcgggctattatttttttgttcccatttgcaaatggcccagttttttacatgtatatattaactgcttatgtgaatacacaaaatattatactaagccaaatatacaactatgtgtgaaaatgatgtcttgattaagggtatcagacatccctttcaacaagaatttcaaaaggaagggcatcatgacaatttttttttctttttcttttatttattttttgtttttgagacagggtctcattctgtcttctaggctgaagtgcagtggcacaatcatggctcactgcagcgttcgtctcctgggctcaagtgattctcccacctcagcctcctgagtagttggcactatagatacatgccaacatgcctggcttttttttttttttttttttttttagtaaagatgaaatctcactatgttgcttaggctggtctcgaactcctgggctcaagtaatcctcccatctagacctcccaaagtgctgggattacaggtgtggaccactgcactcagcctgatgaatttttaaaattatcaaattgcaatatgcatgagtttacacatctattatttttattatgatgattttcaaaaggctagcttgcacttggcaatgctgaattctgattcttctcaatttcacaggagactggagattaaatcagaaatgttaagggcaaacaaaattaaaatcaacattaatgatgtatcatggcaaagaccaccagttaaacattccaccatagatttaaatatctagcctccaacaatgtaaaacatctttgtgataattaaggaaaacaaagcttttggaatctattggacatttatttgccacattgtgttttcaggagaaagaaagtacatgtttgctatctggaggaacttgggcaaatgtaggaaaaaaaaaagaagaagaaagaaacccacatacttctccattcttaagaaaaggaagtagtggtgacatcattctcggctaaaatgtagtctgtttatatctcaaatattcggtaacaatgttttctccagagttatgaagcaactagaacaatcaaatacaattttcttctaaatctttattgcctgattcattcattcatccaacaaatatttattaaacatcgattatgtgtttgatgcttagggacacaatagtaagtggagggaaagatacataatacctgccctcaagaaatttggagttgagtggaggatagaaatataaattaaagaatgacacaaataattataaagttacagctgttaaaagaaaagcatatggtgccaagagaacgtgtaatacaagatctactcatggaggtgagggaaagcttgcccatcaaagaagttatgattcaatccacgaagaccaggagttggctgggtgaagaaaaaaaggtcagaggaaggaagtccacactggggaaggctctaagcataaagggtaggaggattacagaggcatattcacgaaatttggagaaggctttcagtaagcaaggagaagccaaatgaaagtttacgggagagttggaggcttgaagacacgttcaaggatctggtttttatcttctctttatctcaagagcagtgggaagccattaaatgattttaatcagagggttggtataactagttttgtattttgaaaagctgaattcagctctcgtttgagaaactgagtgaaagagcccagaacggccgtggctgagggtgactcgtgggagactcctacacaagccatggcagtggcatgggctggtggcagaagagggaatagggagaagatttggaactcaatcttcctccattgacaaagtcactccagctttggcaaggcaattaattggtgggaaagaagatgcctagccctcctgatttcactgcactttctgcatcttcaacatgagtactgggaagtggcaaaacatccagaggcagcttgggtgctaggtggagcatgagttaaaattccaggatgaagcaaatgaacacttagaatgacaggaaagatttgggagttgggtttgggggagggctatttacctttattccctggagaccctggcacaaacccttgcctctgcaatcttcctctcaggtaaaggaattcattaaatgaattgctagaagatctactgaccagagggctgtacagaatcatatctttgagagtgggaagtaggttgatcacatagtttattatccaatcaggacatatctgaaagagaaagggggttctattaatatttaaactacaaaacatgtacaccaggaatgtcttgggcaaatctggttgccctagcaagaaaggaaatttgaaagtttatactgttctgctcccatgttaccccgtttgcacatgagagggtaagtattctctttcttcacctgcattaagggaataaaagcacaagcattcaggtgactcccaacccacttttaattttacagtttctgctatactctatacattctgaaaattacatttcccaccactatcacttcgtgataggtgatcatttacaattactcactgactcagtcccgggaagaggcggtgcaaaatgggacgctctatccaggtgctcattagaaatgcagaatctctgcctgcctcctagacctactgaattagaatctgcatttttaaataagatttccaggtgatcaatatgtacattaaaacttgagaaaaacctctagacttcgacctaaagaaaaacattttacaacttgacagtgtatgcacatacatacatgcatatagacacaactgaagcacaaatttaatgaagtagaatttaccgttactattttatttgggaaagaaatgtgctcgcgactcaatagattggagtattcactcctggatctcaacttgcaatttgaaaacgcatctctaaagcacctaggagcaatctgaagaaagctgaggggaggcggcagatgttctgatctactagggaaaacgtggacgttttctgttgttactttgtgaactgtgtgcacttagtcattcttgagtaaatacttggagcgaggaactcctgagtggtgtgggagggcggtgaggggcagctgaaagtcggccaaagctctcggaggggctggtctaggaaacatgattggcagctacgagagagctaggggctggacgtcgaggagagggagaaggctctcgggcggagagaggtcctgcccagctgttggcgaggagtttcctgtttcccccgcagcgctgagttgaagttgagtgagtcactcgcgcgcacggagcgacgacacccccgcgcgtgcacccgctcgggacaggagccggactcctgtgcagcttccctcggccgccgggggcctccccgcgcctcgccggcctccaggccccctcctggctggcgagcgggcgccacatctggcccgcacatctgcgctgccggcccggcgcggggtccggagagggcgcggcgcggaggcgcagccaggggtccgggaaggcgccgtccgctgcgctgggggctcggtctatgacgagcagcggggtctgccatgggtcgggggctgctcaggggcctgtggccgctgcacatcgtcctgtggacgcgtatcgccagcacgatcccaccgcacgttcagaagtcgggtgagtggtccccagcccgggctcggcggggcgccgggggtcttcctggggtccccgcctctccgctgcgcttgacagtcgggcccggcaacccggcccccgggcggaaacgaggaaagtttcccccgcgacactcacgcagcccgactcccgtagctgcagggattgtgagtttttcttgaaaaagagaaggaaagttcagttgcaaggggcgcggggcacgtttggtcccctttgtgcgagcaggaaaggcgttgtgttggccgcgttcgaggcgagcccccacccccggaaagggaagtttgagaagttggttatctgaaggcggccggggagcagcggcccggagcggcagcctgagctgccaaagcagccagcgcacctgggccactccgcccatggcgatgccgcgtgcccacccagctctttttgagccacccgttcaaaaggccagctcctcagtccttagctcctggagacggccacgctttccctcaggccggcttcttggcccggagtttttggaaacaagtttcaagaaaataatcgatttccaaaagaaagttagctggctccactgacgccttggcatggatggatagggagtggagatgctcaggtgaaaccgagaatccctcactgaatgcctactgggtgctagaggctgtagattttgcctggaacaagatagtcctgtcttcagggagttgatggttctatgcaattatcgtttgttggaaaccgaagggttaaaatcctaactaggctacccacctgatcgctgtctctgaaggtttttaaggaaaaaataaaaataaaaaaatatatatatatattatatatatataaatatatatataattatatatataaatatatataatattaatatatatatgcatgcaggaatgggggttcttaactatttgttatggaaagtgtaaaacctctgagacttcaaaagttagattttttttttttggagacggagtctcgctct

SEQ ID NO: 44 - DNA, 7309 bp, Homo Sapiens
atgcgatcaatggtgttaactgctctttggactgtccccacagcacaggacaagaccatatcagttccagcaggttccactgaagaaagctcatgtgccttgcagaaacaagacctccagcccagtctaacaggagaccaaccacatgtccatcccattccctcccaaggcatgacagcacctggctgagatgcttgtgtgtattctctgtgtgaagctgagcatgcaaccttcaaagaaaccacaaaggagctactcgtttttaaaggaaaaacacatgaactccacgggcataaggaagacattaaaacagggttggggagaagttcttctccttccatttcatagtacccttcacagaaataattgactgcttgaatatatggtcattgaaacatacatacacacacatacatgcacatgaaaacaagagctggaatatttgactctgctttccatttcccaccaccctagataacacaggatacaacatggctttactgcacacatgtgttttctggcttaaaaacactgagagtagatccctgtggaaagaaatatgaaaacctgaggattcatgcgaatgtagccagaggcgaatgtagccagaggggtcttcaatttgctggcagagctgggggagagctggggcaattttactgccatgaaattggctccagatggaggcaaggaaaggtgtttaccccctgctggtgccagacacagagagatcctgcagtacctcgcatcttaggctcagaattgcccagtgctgggcagcagccccactgagggtctggccagagctcatggggatgggtggaccaggctgtctgttgcttggaaaaggccattttgaatataatgactttcacatggacggtggggcttgggggaaggcatcgtggctagggtctggaggggaagagggaggaaagcaaagaggagcttccctatgaggcaacagaaatgacagtaccttctccaggttgaatttccaaaacccagctctgccctggaagactgggactgtggcatcctctgcagtgttcccagaccgccctaaggcccccaaaccaatgattcacaactatgttgcttccccagagagcatctccccctttggttgacatgtggccagctcaggggtggaggagctccggcagccacgaacccagacgggatgttgactgagagctttgtggccatggcagatgggaggggtgagcttcacccactcaaaggcacccgcaccccaccgatgagtgtggaattgtgctctcccgccctcgcagtgagacgaccgaccaggactgcaggctgagcaaatgggtgttctctggcttatagcgccccctagcaccagccagcgggatagagctccgtgaactctccaaggagccaccacctgcctgtctgaatgctggaaaggggtcggtggtgctgatcattggacccattcaaccaatacttattaaactcgttgttaccaacacttaatccctgtgttctaggggcttagactccagcaagggaaacagatgggtaaataatcacattagagtcagctaagtattgtcaaagaagttgatacagggtgttgtggggatacatgggaggggaatcagaggaggtttcccggaggaggtgacatctaagctgaggtctgaaggatgtggaagagttcagtaactcctgaagaccaaaaaaatggtgataaaaaagacaccttcctaactttttagtgctacgatccaagagacaaacaagcaggtgaacgcataactacactgggctccaccataagccagagcctgtctctcctaggactttggcatcacaatcttctctgaaattctgttttcggcattgattcttgggggaggtagcaatataggaactcagtgttcgttgcgaaactgatggatggtcttcagtcttgggtacgttcccatgtgtcaaacctgtttaaatggcaggacccatctccccttcagaagcattcacttgtcctacaggattccccatggaatcttggagtttttgaggcgagagggatcctggataccactgagttctatctttcatccaataaacacagaagtggacgcctggacaggcaaagtgacttgaccaaggcaggtgcacagctattctgcaacattgggaacaaatctcaggtcttttgattttttgtttccactttactctcttttcatttcccagaaacaaagttttcatgtgcttttttttatagtgatatgtttggaatgcattagctagtaatttaggaagggaaaaaaataaacacacaagagataaacctgtcaggaggacaaacctgtattgcttctgattggctcagagggtgattattatcatggtagagaattatttaatcagtgtaagtaaaatttctctgtgggctgggcactgtacaaagactcaaacgaatctgtctacagatctgaaaagcagatacgagatctgtgaatggctggggtttccaagcccacagtacaagcatgggccacaccttacagcttggaggactgagccctgaaaatgggcaagttccttcacttctctgaaccttatttttcccacatttaaaacaaggatgagtagtttctgaggtcctttttacgacttctcttcctacagactctagcatcctataacttgatacaaagagggtggatatgaactcacctttcctagaaaagttccaggaaagagaataccaggtcatcctagtaggtgtgtagacaggccagatagatcttgaaacttactcagttcttcccagatgtataactctatcattgttcttagctgtcaagagaaagcaggagagcctgcatcttcattctttttttttttttttttttttttggagacggagtctcactccatcacctaggctagagtgcagtggcatgatctcagctcactgcaagctccgcctcccaggttcacgccattctcctgcctcagcctcccaagtaactgggactacaggcgcccaccaccacacctggctaattttttgtgttgttagtacagacggggtttcaccatgttagccaggatggtctcgatctcctgacctcgtgatccgcccaccttggcctctcaaagtgctgggattacaggcgtgagccaccgcacccagcctgcatcttcattcttactgttagcctcaggttcaccccacctagcttattaagtgatgttgaataaccaattcttacatattattaggctcatggacaccatgacatccagactgatgggtgcctgctgaagggggtgaccctagcaggaggactcccctacgcaaggattcatggagtttgctgtttcttttccttagggtgagaaccaaactgccttcacacggtgggcagaggggaactgactcaggtttggaataagagagaacatcccaactgaaaagctcttggaattcgctgaacttcaagacactgtgtggaccagcttaggatagggagtgagaagaaattaaccaaaaggtaatttcgttacttttcagctggaaaaaagatcagattatacttgtgctttcataattaagtagctgctggaaaaaaacgcttcagatgctttctatgagaaaactgctgcttgaagttcagcagaagttatctacttgatacttatattccaggcaaggccttccgttggagaaaatatcggcactttggacaaaactgaaatgtgaaaagaaagggaagagagggcctctatcatgtaagatgcttatccaaagtggatttggtctggaaagtcttctaaaaccttccacatgactgtggaataagtcatgtggggcgcggggataagcgaatctctcaaattccaccacgtatgccctcattcaacctggatccttagagtggcctccagggcactctgctcaggactcagtcagctgttggccacacccatgctctccagtctcctgagaccctatttggttctgagagggctaaaaagcagtgtggctaaatatcccaggcctcaaagtattcctactgtggttggggaagcaatagaatcataccccataaaacaatgaaaacagtgctagaaaaacatcgagagacagaaacatctctacgagttaggccacagttagagtgaaggcagggaaggtttttaaagctgggtggaggggacaagtcaaaaagatgtggaaactggtttccctttcctatggctaaagtgctcaaaggggaaaaaggagtttcaaaaatgttcttggaaataccatctctcacgaattcttcggcctctgctgtcccaatgtcacttgtctgagatgtaaacagaggagttctgagaaagaagctgaacttgcatttctccctgtttctatttgttccaaacttgtggcatttctaacaggatgaagcggaagagaaagggaaagagacaaaagtgtagaaagatggaagatcccagctgcaaatggccatttgcagttagatggaacagctgctgacgttcagggaaatgcatgtctctcttcagatgggaaggagcagtggaaaggggtgacgagttcctggctggccaccaatcatcccatctttctgtgccggttcctcatctggaaagtgggagtgatacttgtgcttgcttttcctacccacaaagattattgtgagagctataatacggtgagatacagaatcctgcttttaaaaatacaaagcagaatcaagatgtcaataataaggatagtaattgtgttagttatctgcaatcatctattatagctagtcgtctaggatcctggatcgttctcctggttttactacagttttggatcagctcacccccaaatcccttgctgaagggtggagctctgtcagccatgggcagggaaccacttcctcttgcctttctactttctgtctttcaaacatgcccagggtctttgcacttgctgttccccctgcctggtacctctctcctgtggcttgccccagagctgatccttgtctttgtccacttctcagcgaggatggcacttcagggagcccttcccttactatcgcagagagagcaggccctccccagtcatgtccaacccagaactctgttttgttttcttcatagccctagcatcacagaaaatcaccctgtgcattcatggatgtccacgggggcaagggctttgtgttgcttaacccagcatcctgaaccgtgtttgttgaatgaatacagaaccccgtttgctctgggagagcacagaaaacagtcttctatcatatatcatagccagctgcaaacagcagatggcttcccatatcccagagagtaagaaccagagagagagagaaagagagagagtttgggtctttctcctctgtgcctgctctctccagagaaactggaggggtagcagttagcattcccccgctggttccaccaagcacagtcaaggtctctaggacatggccacccctcacctgtggaagcggtcctgctggggtgggtgggtgttagttggttctggtttgggtcagagacacccagtggcccaggtgggcgtggggccagggcgcagacgagaaggggcacgagggctccgctccgaggacccagcggcaagcaccggtcccgggcgcgccccagcccacccactcgcgtgcccacggcggcattattccctataaggatctgaacgatccgggggcggccccgccccgttaccccttgcccccggccccgccccctttttggagggccgatgaggtaatgcggctctgccattggtctgagggggcgggccccaacagcccgaggcggggtccccgggggcccagcgctatatcactcggccgcccaggcagcggcgcagagcgggcagcaggcaggcggcgggcgctcagacggcttctcctcctcctcttgctcctccagctcctgctccttcgccgggaggccgcccgccgagtcctgcgccagcgccgaggcagcctcgctgcgccccatcccgtcccgccgggcactcggagggcagcgcgccggaggccaaggttgccccgcacggcccggcgggcgagcgagctcgggctgcagcagccccgccggcggcgcgcacggcaactttggagaggcgagcagcagccccggcagcggcggcagcagcggcaatgaccccttggctcgggctcatcgtgctcctgggcagctggagcctgggggactggggcgccgaggcgtgcacatgctcgcccagccacccccaggacgccttctgcaactccgacatcggtaagcgctcctggtgccccgcccgagccccacgctgcagccaggactgcagcgctgcttagggaggcagggcgagccccactcctttcctctgccccaggagaggggcagacggggttggggcggagtggagaaactcgatgtccttgggcgggggcgctggcatagctgagaggggaagatgccctgcagaggaaactcacagtggctgagggagcccctggccgcctttgctttcctaacttaggtcgtgaggttcctaccggtccttttgacatctggaaaatgtccccattcactactaacggaggaagggctagaagagaagggtggggaaagggttcccaaaacttggaatgctaactaaagtgctgggaaattgaatagttaaaaaaaaaaaaaaaagttgcccgccatgtgcacggaaagttgcaggagaaacttggagtactccgagtctgcatcatctcctgcgcctatgaaattcattcttttcactgagacccaacccagctgcaggcttcccaggcaagcgctaaccgagcttctgggactgccaagtttgggtggatttaagggggaaaatgaggagaaagctgtggcattgacccacgccctggaggcactgtgtttgagagtgttgatagccagcagaaggtgcgaggggtcactcaccacatagctgtgaaaattcacaggaaggctatttttttcccccttgaatgtgtgtggggagggggagaatgggtagtggaaaacagatttgtcaccaaaagaacaaacctgccaagggtcacatcacggtgacagttccagactggacttagtgtcttgagtagagagaccctgtaaagagacctcctactccttagtgtgtatggagggccccgagagcatcctgggaggcttgtctgggagtgtttgggacacttgtgtttggatggctaaaggtggagtggcatctgggaaacatctctctcctcctttccagcccataaag

SEQ ID NO: 45 - DNA, 15863 bp, Homo Sapiens
agcctcaacctcgcaggctcaagcgatcctcccacctcagcctcccaagtagctgggaccataggcccaacttttttgatagagacaggatctggctgtgttaccaaggctggtctcaaactcctgggctcaagcatcctcccaccttggtctcccaaagtgctgggattataggcatgagccaccacaccagccacaaaaatcttttgaacacaaactcactggccaggagcagtgctcacgcctgtaatcccagcactttaggaggcgcaaatgggtggatcacttgaggtcgggagtttgagaccagcctggccaacttggcgaaaccccatctctactccaaataccccaattagccgggtgcggtggtgcgtgcctgtaatcccagctactcaggaagctgaggcagcagaatcgcttgaaccgggacacagaggttgcagtgaggcaagatcacaccactgctctccagcctgggccacagagcgagactctgtctcaaaaccccccccccccaaagaaagccaaaaagaacacaaattgactatctgtattgcaagatatatcttttaaaatgtcctaatactataatcattaatatcataatcacgacctcgatgaaccactctcgagagttgaaaatttgacagtcgttatcaccgtctcagaaagcagtacaaaaaagaaagagtgctgatggaggaggagaaggcccagcagagccctgagtgcctgagtgctccagcgcagggaggtggagacagtgactcatgctgctaagagatgcagtgaggcgaatttagagaatgacccaagaggggctgggcgcggggctcatgcttgtaatcccagcactttgggaggccgaggcaggaggatcacgaggtcaggagatcgagaccatggtgaaaccccgtctctactaaaaatacaaaaaattagccaggcgtggtggcgggcgcctgtagtcccagctactcgggagaggctgaggcaggagaatggcgtgatcccgggaggcagagcttgcagtgagctgagatggcgccactgcactccagctgggtgacagagcgagactctgtctcaaaaaaaaaaaaaaaacacctctctcatgacttcccaaataaactccaaatgccttacccataagaaccaacacgacgtggctgctcttctctgtcctcacccctctgtccccctcacttgcctcagtctggctataccagcattctgggttttttgttttgtgtttgtttgtttgtttgtttgtttgtttgtttgttttgggatggagtctcactctgtcacccaggctggagtgcagtgacatgatcttggctcactgcaacctccatctcctgggttcaaatgattcttctgcttcagcctctcaagtagctgggattacaggcacccaccatcacacccagctaatttttgtatttttgtagagatgaggttttgccatgttggccaggctggtctcaaactcttgacctcaggtgatctgcccacctcagcctcccaaagtgctgggattacaggtgtgagccactgagcccagtctgttttgttgttttttgagatggagtctcactctgtcgcccaggctggagtgcagtggtacaattttgtctgactgcagcctccacctcctgagtttaagagattctcctgcctcagccacacaagtagctgggattacaggcgcgtgccaccacatgcgtctaattttggtatttttagtagcgatggggttttgccatattggccaggctggtctcgaactcctggcctcaagtgatctgcacacctcggcctcctgagtagctgggattacaggcgtgagccaccatgcagggcctttctggtcttttaacgcacaaagctatttcccagttctgggtgtttatagtatcattgccagttcctggaaagctctttccagaagccttcacatgactgatcccttatcctccttcaggtcttagctcaaatgcctccttttcagagagctccttcctgaccattttatgcaatgtgctttcctctagttagtctctcttcattctgtgtatttccttcagagcatttatcatcatcttggtcctgatgcttgctggtttacatgtttgttgtctgtctcccacacagaaagcaaaccagcccttcatctgtcttgtccaccactttatcccagcacagtgactaacatatatcagtagtcaatcaataaatagctataagccaggcacggtgactcacacctgtgatccccgcactttgggaggccaaggtgggcggatcctctgaggtcaggaatttgatatcagcctgcccaacatggcgaaaccccgtctctactaaaactataaaaattagtcgagtgtgatggcgtgcgcctgtaataccagctacttgtgaggctgaggcaggagaatcgcttgaacccgggaggcagaggttgcagtgagccgagatcacaccacagcactccagcctgggtgacagagcaagaccttgtctcaaaaaaataagaaatagaaatatatatatgctgccacaagaaattcactactttttagcaaaaaacacagattcctaattaaagaaaggggaaacctctctctaaataacttcagaattcggggcagaaaacgctacatgtggaaactcgtcttgaaaaacagtcccgtttgtgaacaggaaacacttggactacactttttccatctccacgaaggacttaaatgtgcagcattgatgaagaggcagttagccccagtccttaccatttctgcatattccacctgctccccctcatggtacagctctgggggcaggttataaattcgcaagatgttatcagcactattggtcaagatgcaggaaccgtcaggagccctagaaacaggggagagttagaaagctggccagacctatgcttttcaagtgtagggctagggctgagcctgcctctggggtaggtaagcccccctgaatccttgagggaagtagaagacacaaactgctagataaaatgtaagctcagtctaaaagggctacgtgccgcttctcccagctctggggcatccctctcctagaaaactggactgttttacagtgaaaatctcgggggtggtcagctccctgccccgttgttatccttaccacttacagcctttcaagaagttctcaggttgggtgctgaactctgaccaggaaccactgagaaatcgaggcagctgggagaagctgtagttccaagcgctgaaaggaagatgggggacaataaacctgggtcgccaagcaaagggggcagaggcctggagaagtgggtctcaggaccagaggacagatcgacctcacacttcatctccccagactccacactccactgccatcaccacttacgtgtctccctcgtcctctgcagcgggttccccagaggtatcttccatggcttttccagaccccaactctggcccgttcgcttcttcttcagaaaggctcccgtttgcttcttctgcaggaaggcttgtattttcagaaagttcttgctcctcgattcgaggactcaactcactaggggaaccaaactctgtttccaggggagtggagagagaaactgggtccccctcccgtagctcctgggacacagctgagccagccacaggatctggggacaaccggggcggatcccccctttcgggaggcggtggcatcagttcagagtccgcatttttattcatcggggaagcgtggggagaaggatgggctggagctgggtcctggtctgaaggacagcagtccggagctaacggttgagtctccaaagtcttcatactgcagaggaagcacagcggagattagcctcagccaggatggcttcgaagttctcagggatccgacgcagagctaaagaaacccacctgtgcttccctcctcttctgggagtaggcagaagactcccgggaggagaggcgaacagcggacgccaattcttttgaaagcactgtgttccttagcaccgcgggtcgctacgggcctcttgctgtcgcgggatttcggtccaccttccgattgggccgccgcatcccggatcagatttcgcgggcgacccacggaacccgcggagccgggacgtgaaaggttagaaggtttcccgttcccatcaagccctagggctcctcgtggctgctgggagttgtagtctgaacgcttctatcttggcgagaagcgcctacgctccccctaccgagtcccgcggtaattcttaaagcacctgcaccgcccccccgccgcctgcagagggcgcagcaggtcttgcacctcttctgcatctcattctccaggcttcagacctgtctccctcattcaaaaaatatttattatcgagctcttacttgctacccagcactgatataggcactcaggaatacaacaatgaataagatagtagaaaaattctatatcctcataaggcttacgtttccatgtactgaaagcaatgaacaaataaatcttatcagagtgataagggttgtgaaggagattaaataagatggtgtgatataaagtatctgggagaaaacgttagggtgtgatattacggaaagccttcctaaaaaatgacattttaactgatgagaagaaaggatccagctgagagcaaacgcaaaagctttcttccttccacccttcatatttgacacaatgcaggattcctccaaaatgatttccaccaattctgccctcacagctctggcttgcagaattttccaccccaaaatgttagtatctacggcaccaggtcggcgagaatcctgactctgcaccctcctccccaactccatttcctttgcttcctccggcaggcggattacttgcccttacttgtcatggcgactgtccagctttgtgccaggagcctcgcaggggttgatgggattggggttttcccctcccatgtgctcaagactggcgctaaaagttttgagcttctcaaaagtctagagccaccgtccagggagcaggtagctgctgggctccggggacactttgcgttcgggctgggagcgtgctttccacgacggtgacacgcttccctggattgggtaagctcctgactgaacttgatgagtcctctctgagtcacgggctctcggctccgtgtattttcagctcgggaaaatcgctggggctgggggtggggcagtggggacttagcgagtttgggggtgagtgggatggaagcttggctagagggatcatcataggagttgcattgttgggagacctgggtgtagatgatggggatgttaggaccatccgaactcaaagttgaacgcctaggcagaggagtggagctttggggaaccttgagccggcctaaagcgtacttctttgcacatccacccggtgctgggcgtagggaatccctgaaataaaagatgcacaaagcattgaggtctgagacttttggatctcgaaacattgagaactcatagctgtatattttagagcccatggcatcctagtgaaaactggggctccattccgaaatgatcatttgggggtgatccggggagcccaagctgctaaggtcccacaacttccggacctttgtccttcctggagcgatctttccaggcagcccccggctccgctagatggagaaaatccaattgaaggctgtcagtcgtggaagtgagaagtgctaaaccaggggtttgcccgccaggccgaggaggaccgtcgcaatctgagaggcccggcagccctgttattgtttggctccacatttacatttctgcctcttgcagcagcatttccggtttctttttgccggagcagctcactattcacccgatgagaggggaggagagagagagaaaatgtcctttaggccggttcctcttacttggcagagggaggctgctattctccgcctgcatttctttttctggattacttagttatggcctttgcaaaggcaggggtatttgttttgatgcaaacctcaatccctccccttctttgaatggtgtgccccaccccccgggtcgcctgcaacctaggcggacgctaccatggcgtagacagggagggaaagaagtgtgcagaaggcaagcccggaggcactttcaagaatgagcatatctcatcttcccggagaaaaaaaaaaaagaatggtacgtctgagaatgaaattttgaaagagtgcaatgatgggtcgtttgataatttgtcgggaaaaacaatctacctgttatctagctttgggctaggccattccagttccagacgcaggctgaacgtcgtgaagcggaaggggcgggcccgcaggcgtccgtgtggtcctccgtgcagccctcggcccgagccggttcttcctggtaggaggcggaactcgaattcatttctcccgctgccccatctcttagctcgcggttgtttcattccgcagtttcttcccatgcacctgccgcgtaccggccactttgtgccgtacttacgtcatctttttcctaaatcgaggtggcatttacacacagcgccagtgcacacagcaagtgcacaggaagatgagttttggcccctaaccgctccgtgatgcctaccaagtcacagacccttttcatcgtcccagaaacgtttcatcacgtctcttcccagtcgattcccgaccccacctttattttgatctccataaccattttgcctgttggagaacttcatatagaatggaatcaggatgggcgctgtggctcacgcctgcactttggctcacgcctgcactttgggaggccgaggcgggcggattacttgaggataggagttccagaccagcgtggccaacgtggtgaatccccgtctctactaaaaaatacaaaaattagctgggcgtggtgggtgcctgtaatcccagctattcgggagggtgaggcaggagaatcgcttgaacccgggaggcagaggttgcagtgagccaagatcgtgccactacactccagcctgggcgacaagaacgaaactccgtctcaaaaaaaaggggggaatcatacattatgtgctcatttttgtcgggcttctgtccttcaatgtactgtctgacattcgttcatgttgtatatatcagtattttgctccttttcatttagtatagtccatcgattgtatatccgtccttttgatggccttttgagttgtttcccatttgcggttatgaaataaagctgctataaacattcttgtacaattctttttgtgatcatatgttttcgtgtttcttggagaaatacttaggaggggaattgtggaggaagtaaaaagtagctgtattttgaactttttcagaagctctgagttttccagagcggttgtaccattttacactccaactagcaaggtatgggagttattatggttgtgccacagccttccggacattaggtatgtcagtctttctaatgtggtatatccttgtggttgtaatttacagttctctattgactaaggatgttcagcattttttcatgtgcctattggccattcgtattttgtttgtaaagtagctcttcgagtcttttacctgttattttggtttttttgtttgtttttattgttcagttgtgggactgctttatactttctggatacaagtccttatcagatccatgagtcgtgaatgttttcttctgatctgttgcgggcctatttgtttgctttacagagtttacagaatcttaagaggagtggattaatcttttttatgttcagtatttgccttgtcctgtttaggacatctttttttttttttttaaccccagggtcatgaagatataatcttacattttcttttaggacctttatggtggtaagttttacagtaaggtccttaagccattaattaattcttaaaattaattgtttatggtgtgaggtgtaggagtcagtctctggtatctttcctgtatggaaatccagttattctgtctccacttgttgaaataggcttcctttctctactgaatgcttttaattttaattattttacagttggagtatagggctaccattttagtgctattttctttttttctttgttaatttttgagacagggactcacactgttgcccaggctagagtacaatggcacaatcaaggcttactgcagcctcgaacccctgggctcaagcagtcctctagcagcctcacgagtagctgggattactccaccacacccagctaactattttatttttttgtattgacaggatctcactatgttgcccaggctggtctcaaactgctggcctcaagctttcatcccatctcggcctcccaaagtgctgggattacaggtgtgagccaccatgcctgacctcttagtgctattttctatttatctcctctgttctctgctctctttaaacgttggaggaagaaacagtacccatcttacacaaactcttcagaaaacagaggaacagactgggcgcggtggctcatacctgtaatctcagcactttggtacgctgaggcaggggatcatttgaggtcgggagttcgagaccagcctggccaacacggcgaaaccccatctctactaaaatacaaaagtagctaggcgtgcaccatacctgtaatgccagttactcaggaggctgaggcacaagaatcccttgaacctgggaagcggaggttgcagtgagccgagattgcgccactgcactccagcctgggcaacagagtgagaccctgtctcagaaaaaaaaagaaagaaagaaaaaatagaggaatatttcccaacttgttttcgaagccaggataatcctggtaccaaaaccaaacaaggacattataagaaaagaaaatatagaccaatattcctgttagcatagacatgcaacagctaaccaattttagcaaaccaaacctggtaatatagaaaaaaggataaataggccagtcgcggtggctcacgcctgtaatcccagcactttgggaggctgaggcaggcagatcacttgaggtcaggagtttgagaccagcctgaccaacatggtgaaaccccgtttctaataaaaatacaaaaatcaggctgggcacggtggctcacgcctgtaatcccagcactttgggaggccgaggtgggcagatcacgaggtcaggagttcaagaccagcctgaccaatgtggtgaaacgccatctctactaaaaatacgaaaatcagccggtgtggtggcacctgcctgtaatcccagctactcaggaggctgaggcagaattgcttgaacccgggaggcagaggttgcagtgagccaagatcgtgccactgcactccagcctgggcgacagagcaagacttcatctcaaaaaaaaaaaaaattagctgggcatggtggtgggcacctgaaatcccagctactcgggagtctgaggcaggagaatcgcttgaacccaggaggcagaagttgcactgagctgggatcacaccattgcactccagcctgggcaacagagtgagactccatctcaaaaaaagaaaaagaaaaaggataaatacattctaaccaaataatgtttatctcatgattgtagctgattcaacattcaaaaattggcctggtgcagtagctcaggcctgtaatcccaacattttaggaggctgaggcaggaagatctcttgagcccaggatttcaagaccagcctgggcaacatagtcagactggtctttactggggggaaaaaaatcagtctgtgtaattcaccacattaacaaagggaaacataaaaaccctatgatcatttcaacagatgtagcaaaagcagttaatgatatcaacacatatgcatgattacaaaccaaccaacctcctagcaaactagggaaaggaaacttaactagtttgataacagggcgtccacagtcggagttccactagcagcatacataatggtagaaaactcagtgctgctgggggcggtggctcacgcctgtaatgccagcgctttgggaggcctaggcgggcggatcacgaggtcaggagatcgagactgtcctgactagcatgctgaaaccccgtctctactaaaaatacaaaaacaaaaaattagccgggcatggtggcgggcgcctatagtgccagctactcgggaggctgaggcgagagaatggcgtgaacccgggaggcggagcttgcagagcctagatcgtgccactgcactccagcctgggtgacagagtgagacttcgtctcaaaaaaaaaaaaaaaaaaaaaagaaaagaaaactcaacgctttttcctctaagatcaggaactagaaaaggatttgactctcacaacgttgataccatactggaggttttaaccaggcaagaaaaagaaataatgagggccgggtgcggtggctcaggcctgtaatcccagcactttgggaagccgagacgggtggatcacgaggtcaggagatcgagccatcctggctaacacggtgaaaccctgtctctactaaatatacaaaaaattagccgggcgtggtggcgggcgcctgtagtcccagctactcgggaggctgaggcaggagaatggcgtgaactcagggggcggagcttgcagtgagctgagatcgagccactgcactccagcctgggcgacagagcaagactgtgtctcaaaaaaaaaaaaagaaaaagaaataatgattagtggcccgatgtctcacgccagtaatcccagcactttgggaggccgaggtgggcagatcacctgaggtctggagttggagaccagcctgacaaagatggtgaaacctcgtctctattaaaatattaaaaaaatagccaggcgttggccgggtacagtggctcatgcctgtaaccccagcactttgggaggccgaggtgggtggatcacctgaggtcaggagttcaacaccagcctggccaacatggtgaaaccccatctctactaaaaatacaaaattagccgggcgtagtggcgggcgcctgtaatcccagctacttgggaggcttaggcaggagaatcgcttgaacctgggaggcggaggttgtagtgagccgagattgcaccattgcactccagcctgggtgacaaaagcaaaaactccgtctcaaaaaaaaaagaattagccaggggtagtggtgaacgcctgtagtcccagctactcaggaggcagaggcaggagaatcacttgaaccccggaggcagaggttgcagtgagccgagattgtcccattgcactccagcctaggcgagaagagcaaaattccatgtcaaaaaaaaaaaaaaaaaaggaaagaaaaaaaataacgattagaaaggaagaaatcaaacacattcacagccagtatgattctatacataccatggtcctaatggggccaggcgtggtggctcatgctgtaatcctagcacttttaggaggctgaggcaggtggcttccctgggaccagctggccaacatggtgaaaccccaactctaataaaaatacaaaaaatcagccaggcgtggtgagggcacctctaatcccagctactcaggaggctgaggcaggagaattgcttggacctgggaggcagaggttgcagtgagccgagatcgcgctattgcactccagcctgggcaacaagagtgaaactccggcagggtgtggtcttacgcctgtaatcccagcacttcgggaggctgagccaggccgatcacctgaggtcaggagtttgagaccaacctaacatggtgaaaccccgtctctactaaaaatacaagaattagctgggtgtagtggtgggcgcctgtaatcccagctacttgggaggctgagacagaagaattgcttgaacccaggaggtggaggttgcagtgagctgagatcatgccattgcacaccacgccgggcaacagagcgagattccgtctcaaaaaaaaaaaaaagatgaaactctatctcaaaaaaaaaaaaaagtcctaatggaaaatccataaaaagctaccaaaactaataaataaatatagcagggttgcaggttacagggcaatatagttatccctctatctgtaggggcttggttctgggactcctcacacaccaaacccacagatgtctaagtcccatatataagacggaatagtatttaacctacacatatcctcccatatagtttaaattatctagattacttacattacccccatacaatgaaaatgctaatgtacatgcaagtatgtatgtaagtacttgtactatattgtttagggaatcactggacagataggccttcaagactgataccagcagccactgttaagattctggtcaggcctgcccctgtttggggtctcagttgatctcattgccttcccacccagccaagggcacctgcatttctcttggctccctggccatttggaaggcctagttcagcctggcacatttgtatcctggcccactgatgctggtacccctgggaaggtcctgctctgaaaaacacggagattttagttgctactgaagatttgagagataaagacagggagacctgtctgtagacctgtgtccctccaagtgggattgagactttgggccccccatttcaggacagcacctcctggcctgttgactgaatagatccctgaaggaggtgtagttgcattttaggagtgggggtgggagcagtaccactgatccgcactaacaatcacacagttctctctagaataataatatagaacaagtgaaatagaacaattgcagaaagagctaacctttgttgagctcttactgtgtgcccagcactttcctcaactctacatttcccataatacatagagtactaggtaggcggggcttgggggctcacgcctgtaatcccagcactttaggaggccaaggggggtggatcacctgaggtcgggagttcaagaccagcctgactaacatggtgaaaccccgtctctactagaagtacaaaattagccaggtgtggtggcacatgcttgtagtcctagctactcagcaggctgaggcaggagaatcatttgaatccgggaggaggttgcagtaagcggagatagtgccactgtactccagcctgggcaataagagctgagactccgtctcaaaataaaataaaataaaataaaataaaataaaataaaataaaaaaagaaaagagcctgccattaaaggagctgtttggtaggggatgttttgtcagtgcaaacaacagaaaagtgggctgggcacagtggttcatgcctgtaatcccagcactttgggaggccaaggcgggcggatcacctgaagttgggagttcaagaccagcctgaccaatatggagaaaccccgtctctactaaaaatacaaaattagccgggcgcagtggccgatgcctgtaatcccagctactcgggaggctgaggcaggagaatcgcttgaacctgggaggcagaggttgcggtgagccgagatcgcaccattgcactccagcctggacgagagcaaaactctgtctcaaaaaaaaaaaaaaacagaaaagtgtaacaaacacttacagtaggcatgtttcttagcaaatctgatgacaaatttggcataaagaaagagagcatccctgaaaaaaaaaaaaagaaaaagaaagagagcatcctgcctgggcaacatagtgaaaccctgcctctacaaaaaaactcaaaaattggccgggtgcagtggctcacacctgtaatcccagcactttgggagtcggaggcgggaggatcacctgaggtcaggagttcgaaaccagcctggccaacatggcaaaaccccatctctactaaaaatacaaaaaattaatcaggcgcattggtgggcgcctgtaatcccagctactcaggaagttgaggcaagaggatcgcttgatactgggaggtggaggttacagtgagtcgagatcacaccactgcactctagcctgggtgacagggcgagactccgtctccaaaaaaaaaaagaaaaagaaaaagactaaaaaattagccaggcaggcctctgtggtcccagctacttgggaggctgaggcaggagaatcactgagcccaggagtggcaggctgtagtgagccatgattgcaccactgtaccctagcttgggcttcaaagcaagaccctgcctcaaaagaaaaaagaaagaaagaaagaacatggcgggccaggcacagtggctcacacctgtaatcccagcgctttgagaggccgaggcaggtggatcacaaggtcaggagttccacaccagcctggccaacatggtgaaaccctgtctctactaaaaatacaaaaaatcagcaggcagggtggtaggggcctgtaatcccagctactcgggaggctgaggcaggagaattgcttgaaaccagaaggcagaggttgcagtgagcctagactgcaccactgcactccagcctgggcgaaaagagccaaactccatctcaaaaaacaaacaaaaaaacaaaacaaaaaaaaacatggcagcctttgaaagcttgtctgggagaaggtgcgatgatggttgcataacttcgtgcaagatgctggtccacacaggggctgccccttgctctttctcgctctcttaacctctcatataacaggcttgtgtgttatgcacatttattgagcccaagcaggtgcaaggcattgtgatctaatactttggtcagcaagacaacaagatagatcactgccctgcccttaggaagtgtatatgctattagaggaaacagataaaataaacaaggaaaagtatcagacaatgtaagtgctatgagaatgcaaatgaggtgatgtgaattaaaataggatgacttaagtctgcacggaaggcccctacccccatgttcctggctagccaaggaaccaccagttgattagcagagaagggcagcccgtctagctagagcttttggggaagagggagtggttgttaagagatgagattaaagaagccgagacgggcccttcgtgagggggggttgtaatgcagggctgaggagtgtccgaagagaatgggcaggtgagcggtgagacagttgttcttccagaagctttgcagtgaaaggaatcaaagaaatggagccgtgtatcaggtggggaagggtgggggccaagggggtgtccttccccatacagagattgcaggctgagaatgactatatccttgttaacaggaggtgggagcagggcacggtagctcacacctgtaatcttggcactttaggaggcggaggcgggccgatcacctgaagtaaggagttcgagaccagcctggccaacatgcaaagccctgtctctactaaaaatacaaaaattagctgggtgtggtggtactcgcctgtaatcccagctactcgggagactgaggcaggagaatggcttgaacccggaaggtagaggttgcagtgagctgagatcatgccactgtgctccagcctaggtgacagagagagactccatctcaaaaaaaaaaaaaaatacaggaagggagttgggaatagggtgcacatttaggaagtcttggggatttagtggtgggaaggttggaagtccctctctgattgtcttttcctcaaagaagtgcatggctggtgtggggtggggcaggagtgcttgggttgtggtgaaacattggaagagagaatgtgaagcagccattcttttcctgctccacaggaagccgagctgtctcagacactggcatggtgttgggggagggggttccttctctgcaggcccaggtgacccagggttggaagtgtctcatgctggatccccacttttcctcttgcagc

SEQ ID NO: 46 - DNA, 6077 bp, Homo Sapiens
aaaatatgagaaagcaagcacctgacattctccactccaaaagaggggggccttcggaatgctactgccctggccttcagtgactgtggccttctctcctgccagaggtttcatgtctagatcaccagtgacatccccagcccctaaagatcagttcagttcatacaagggtaatgttgaaatatacaagccaggttttaatattgctatactctattgtaaagtataaaagtatgttttaactcgctacttaaagctttaagacatttttaagtcccttcttatctgtatgttaaaaactaaacttaaatgggaagtagcattgggagaaagctcttctgtgaactaataaccaaaatcctctgctagttttataaacacttttggacaatttcctcaaatttataaagggtaagaattgaggcttcacagatgacaacgaaaatggcaaggaatgcatcaatcttcttatgcagtgccgaactcagagccaaaacaacagaagatcaaaagacaggctttcacttctgcacacataaagatgcttcgcaaatgctcatttatctccattaacctattcctaacacgaaacgggaaatgtttaagtgttagtactattttcttaaagatagtttcttcttgtccatatttgttcattatgtccctatccaagcaaacaatttcaagtaaaaataacgcctgagtactcacctgctgaatgtatattttactacagtttcaagatcaagaactgatgtttaaatattaactgcttcgttagttttacttatcaaggtcaaagtagtttgtgttttatgaaccgatatcaaaaaagaaagccacgttagttttccgtgggagaaaagagagacaggcgggtgacggcagattggaacaaggagctaccacagcacttactttctcacactgtagctttgaaaactgtgatcagttacagtgaattccttatgaaatggaatatttttaccaacaccttgaggaaccacataaactctactgcaagatatgaaaactagaaacatggacctgctctccccagtcctcagggctttcaagaagatgattccagtaacagatcattaccaagtgtttcagggtattttgaccagagtgtacaagctggaaaaaaacacccaagttaagcaagcagatgtaatctttctccttataattcactgaaattttcataaatggtaaaaacaaaaaacaaacctctcatttaattgaggaggggggcacattgaaaatataccaaggctgagatgccatttaaactaatgaggttttctgttttgtagctgatgctattttatgtgatttggaataaaacctccctgaagaggtaaaaaacgtaatttgagagttaaactctcaaaagctagacagagcacaggaatgtcaggagtggcaaaacctgaaaaagcatcatgatacatcagtcagttagtacaggtggtggataaggaaaacgaagcccactttttacgaggcatgtttcttcttagtggctttccaatgccaattgtccccctcttctgaggacatacatactaggcatccgggttatccctctcttctgaggatatacactactaggcatccaggtacatacactatatgttttgaagcttaaagttatagctctgtgatttaagcacccttctgccacccatggaacgaagacctcaaatcccagccatgaggacaactacttccttacctggggatagaatactagtatttaaatcatttattcggcatgtggtagaggagaagagaattagaggagaagtagagatgacaaagtagccacaccacttaccagtttacaggcaacagaatcatcaatttgccttttgtgacaaagtaacaacaaagagccgacatctcctataccctcacctgtgtgcagtcggcactgccgatacccacctttccaagggcacctccccagaccccccacctgtctacggtatcttcctgggtcccgcacctgcccgggcacctgccggggtcctgcacctgtccggcccccatatctgcttggggtacctgcctgggccccgcacctgcttggggtacctgcctgggccccgcacctgcttggggcacctccccgggccctccacctgtctagggtatcttcctgggtcccgcacctgtctggggcacttgctcagacactgcacctgccccgggtacctgcccgggccccgcacctgtccgggcaccgcacctgcaggatccccaagctgcctccacccacgcggccgcccccggccctgcccgccggggacgctggcaccgaggatgtcctgcccgtggcccaggtccccgccgctcaccaggtacttgccgtccggggagaacttgcagagtaagctggagagcttgaatacctcggagaagttcatggccgccgcctgccgcgggcgccaccctgcgcccgaaaacccgcgggacccctgggcgcgcagcaggctgcaacagccgacgccggcctccgaggccggaagtcagaaggcggaagtgaactgcagcctatcagcgccgccggcttccgcgcggcattgtggggcttgtagttcttgtgccgcagggctttaaaggaaacgcccacgtttcttccgaccagggatttccgacccgagaaccttacctcaaaggccgggaggcctttgagcacctccagctagggctgctgataaaaatgtagaaagcacagtaaaatttgaatttcagattcacaacaaatctagttataagtatgttcccaaatattgcacgggacatgctaatacggaaaaattactcgctagtctgaaattcaaatttaattgagcgacctgtgtgtctgcgtgtgtgtacacatgcatatatatatatttatatttatatgtaaatgtatgtttacatgtaaatatatgtttacctacaaatatatctttaataagtaatacggtgtctgtcgcacatatattatatcgtgtatgtaatgtataagtatttatttcgtttgcttggggttttgtttgcttttgctgagtccgacccctctacctgccgcctggcccttgcctcacgctccagtgccactgagatcaaggagagaacgaatttgccgctgactgggcagagcgagcgcgtggatcgcggccaccgcccgttcatcacccgcgcgcatctgggctggcaccgggcgaagaatcgtgcgggtctgggacctgggggcccagagggagcgagctcctgcgcgggcgctcggtccgcaggtttcgcaggctcaggggcgtgcctcgttctcacccccactccggaccccggtcctcttccctagacagcggccccctccacccctggctcccgcaggccgctagtagtccgcgccaggccccgccggcgcctctagggccccccagatcgcgcagaccctgacatccccgcctggccctgggttctgggagctgagagccggccagggtcctgctcgtacctccgggcgcccagcctcgggtctgctccccgcggacgccccaacctccccggccgaatggatggtggtgcgcgcgcgtcctactccggcggtgccggccttttctgttgccaaaactagacccaaacctctgcatgggattcgtctttgggtccccaccccgtgcgcccagcaaacagtgggtgagccatgaagatgtgcgagtcagccggaccctccccgtcaggcgcggacccgctgcggccagagaacccagtctgcgccagcccggctcgctcgcgaagccacgggcttcactgacgcgactttccaagacgtgggggtcaccatgggcagaggacatcggttcggagccagatcacgggccccataagcatcagaccataagcagcgccgccactgagagccgctcggaactcgcccagcatgtcgggtcccctagccagggcctggtgtacgtggtcgagggccctggaagccccgatggcctaggaggagcaggcgggcggggcggcgggtgtcgctggccggtagagagcttcggcctgacctagcgcaggtctggtgcgcgcagagaacaactccaagcgcaccgacgcccgcgagctccttccaaacaccgaacgggatccagagcccgagcccacaggcggcggccgggggagggagcagggtgctggccgccgcccgggagtgttcgcgtcctgggtgacccctggaaggacgtggggcccaaactccggctggggttgggagagcagcccccagaggctctccgcgggatcctctgccgggcgggaccgtggctccacaggagaagtgggtggcaagccctgcttggcggaaagcagccgttcccctcctcctgggcctggggcggcgcccctcacccctgttccccgcccctcacccctgttccccgccggccacatcccctgccccttggattccaagcgccccgcgcgccgaggagcccagcgctagtggcggcggccaggagagacccgggtgtcaggaaagatgggccgtctgggggacagcagggagtccgggggaaacgcaggcgtcgggcacagagtcggcaccggcgtccccagctctgccgaagatcgcggtcgggtctggcccgcgggaggggccctggcgccggacctgcttcggccctgcgtgggcggcctcgccgggctctgcaggagcgacgcgcgccaaaaggcggcgggaaggaggcggggcagagcgcgcccgggaccccgacttggacgcggccagctggagaggcggagcgccgggaggagaccttggccccgccgcgactcggtggcccgcgctgccttcccgcgcgccgggctaaaaaggcgctaacgcccgcggccgcctactccccgcggcgcctcccctccccgcgcccatataacccgcctaggggccgggcagcccgccctgcctccccgcccgcgcacccgcccggaggctcgcgcgcccgcgaaggggacgcagcgaaaccggggcccgcgccaggccagccgggacggacgccgatgcccggggctgcgacggctgcaggtaggaggcccagggccggggggcggttcggctccgcgggcgggggctggagcgcagcgctgggcaggcacctgggctcgcagctccgaagctgggaggtgaggggagagcgatcggggacgagctgggacaaggcgacacaggggctccctcggagttggatcggcccctgggacttggcgctcgcgagaggctggagcggccagagtctagcctgcgaggagacgcgggtcctgccctcagcgccggccgcctttggcgccaaagacagccccgcaggggttccgggagggccctcctcctgctgtcccctctccaccccgggctccgagggccgttgggagggtaaccccgggaagaggccggggtgcggggcgcgggtgcaggtggaaatcgccagcaagctcctccccgcccgcgcgctccctccgacctgcagggctgtgccaatcccgaggcctcagcttccctgaggagccagggccaggcccccctctggacagggagaaggatctgggcgggggccttgacccatggagttggttactaagcggtttcgatggtttcccgagggacagctccctgtggctctgagtttgtctgtcgagggctcctggcctgtctccggagcggtcccaggtagagaaagcccgtgaagaaatggcccgggccggcctggagggagacacctcacgcccccttagctcctgggccgcctcctcctgcagcccctgcctttcccggggcttggacttggggagcgatgattacctttgctcagcttgtattttggcctggacgctaggagataagcccatgtagtatgcacacgtctgctacataaacaggggacagatagacgatcttcaaccagcaagggtgcagggaaaagcaatgcaccccaaacttctgaccagaggtcatttgcttccaaagatgctgccatctgtttattcactgtctggacatttggaaatggctcaggctcattaacacaatg

SEQ ID NO: 47 - DNA, 2501 bp, Homo Sapiens
agctgggactacaggtgcacgccactatgcctggctaattctttcattttttatagagacaggacctcgctatgttgcccaggctggttccaactcctgaactcaagtgatccacctgccttgggctcccaaaatctcgggattacaggcgtatagtgctaggccttcacattcttatatacccttctgtttccttagctgtgaaatggagataatgacatagccttaattcacgtgggatgcttagcacagtgtctggcacttgatagatttttttctttctacttgaaatttatttttgagctgggcacggtggctcacacctgtaatcccagcacttgggaaaaccaaggcaggcagattacctgaggtgaggagttcaagaccagcctggcaaacatggtgaaaccccgtctctactaaaagtacaaaaattacctgggtgtggtggcacacacctgtaatcccagctactccagaggctgaggcacgataatcacttgaactcggcagatggaggttgcagctgagctgagactgagccactgcactccagcctgggtgataaagcgagactgtctaaaaaaaaattatttttaacctaatataaaactctctgaacccttctttttctgagctgcttctccacttgagtccatcccacatcattgaacagttaatcacagaattgtgtaccatcttccttgacccccagatctttagccttctatagtaccctgtctctttttgtcgtactagtcacagttgcactttttttttttttttttttgagacagagtctcattctgtcacccaggctgcagtgcagtagcacaatctcagctcactgcaacctccgcctcccgggttcaagcaattctcctgcctcagcctcctaagtagctgggattacatgcgcgcaccaccacgccaggctaatttttgtatttttagtagagacgaggtttcaccatgttgtcaggctggtctagaactcctgaccttgtgatcagcccacttcagcctcccaaagtactgggattacaggcatgagccactgcacccggccatagttgctattttatttgtgtgattgattaccgtatgacgcttttattgaagtgcagtgaaggcaggaaacatgaccggtttttacaatattttcaacacttatcaccataggtggtacatagtagggccttaataaatatttgtaaaatgaacaaagttaatgagtgtttatgtttgtagttttaattgctctgaagtaaatatctgattttccaatttccaccagagtgctctgcacatagtaggtctaattatttttccctctttactaatcacccatgccttgtaagaattcagttagttgactttttgtactttataagcgtgatgattgggtgttcccgtgtgagatgcgccaccctcgaaccttgttacgacgtcggcacattgcgcgtctgacatgaagaaaaaaaaaattcagttagtccaccaggcacagtggctaaggcctgtaatccctgcactttgagaggccaaggcaggaggatcacttgaacccaggagttcgagaccagcctaggcaacatagcgagactccgtttcaaacaacaaataaaaataattagtcgggcatggtggtgcgcgcctacagtaccaactactcgggaggctgaggcgagacgatcgcttgagccagggaggtcaaggctgcagtgagccaagctcgcgccactgcactccagcccgggcgacagagtgagaccctgtctcaaaaaaaaaaaaaacaccaaaccttagaggggcgaaaaaaaattttatagtggaaatacagtaacgagttggcctagcctcgcctccgttacaacggcctacggtgctggaggatccttctgcgcacgcgcacagcctccggccggctatttccgcgagcgcgttccatcctctaccgagcgcgcgcgaagactacggaggtcgactcgggagcgcgcacgcagctccgccccgcgtccgacccgcggatcccgcggcgtccggcccgggtggtctggatcgcggagggaatgccccggagggcggagaactgggacgaggccgaggtaggcgcggaggaggcaggcgtcgaagagtacggccctgaagaagacggcggggaggagtcgggcgccgaggagtccggcccggaagagtccggcccggaggaactgggcgccgaggaggagatggaggccgggcggccgcggcccgtgctgcgctcggtgaactcgcgcgagccctcccaggtcatcttctgcaatcgcagtccgcgcgtcgtgctgcccgtatggctcaacttcgacggcgagccgcagccctacccaacgctgccgcctggcacgggccgccgcatccacagctaccgaggtacgggcccggcgcttaggcccgacccagcagggacgatagcacggtctgaagcccctctaccgccccggggtccattttgcagacgg

SEQ ID NO: 48 - DNA, 2401 bp, Homo Sapiens
tcatcaaagaaaaaaaagatgacttactagacagttgttaaggcactcacataaaactacacgatagcaggatagatggtaaccaagagggaactcaggacccgtcactaccagctggaaacacctgacctccagcctgcaaatgtgacaagctagaccaacaccagcaggacactgaacacagcttgcagggatgagtctctgcgtcatttctggacatgtgtccaagtaaccagaacaactcaaaatgccaccaggcccttgctgtcattcccataaacctcgaacagtgagttgggtcttcaaggaacctgtctctgtcagcttaccttatgctgcataacaaacaggcccaaagctcttggcagcgtacatcaagcatggaggatctctcactcaccacgacagtcccttcgctggagggctggggttgtactccattttctcttttggaaggggcggcccctgtctgaggtctcatttgtctcacagcagagggatgaaacggcaggaccctggctttgacgggctccatttggcaatggtacatgccaagtgggtcacgtttcactgcccagagcaagttacatggccacgtctgatattgacgtgcgggaaatgcagaatcttcctgcatttggggaggcagatatttggacaacatgcaattcattacagggccagctggatgaagaacggccaagggcccaggctcttcaccccgagccaggccgaaccagccggggccgtgagatcaagccacggtcatcagtgttcgtttggaattatgccttgtccttgccgtgtccacattgtagtagggtttctgttttttaattcatctgaaattggtggtgggtgtggtacacagatgagaaacaggaactctccacgctgggctttaacaggagctgcggtgggaacacaaatggtgcagccactttggaagatagtttggtggctccttacaaaactaaatgtacccttcacatatgatccgccacacaccatccagcaattgtaccccttggtatttgcccagatgagtcaaaaacttgcatccacacaaaaacttgcacgtggatgttgatagcagctttattcataattgcccaaacctggaagccttcaggaggtgagtgggtaaacaaactgtggtgcctccggtcagcggaatattattcagtgctaaaaagaaatgagctcaagtcatggaaagacatgaaagaaccttaagtattattaagtcaaagaagccaatctgaaaaggctgatgctgtatgagttcacatctatgacattatagaaaaggcaaaactacaaagacagtaaaaggatcagtggttgcaggagctagggaggagggagggatgaataggtggggcacagaggatttttagggcagtgaaactaccttgtatgatactgtaatggtggacacaggacagtaagcatttgtcctttatcccgtagaatgtacggcactgagaacggaccctcctgtaacatatggactttcagttataatattgaatccctttcggggttccgtaccgcccgcagcgccctttaactcccgcccccgccccgctcaccgcccccttcccctgctacagcgcgctcgccccgcggccgccaatcagccgcgcgccccggccgcgcgccccgccccgcccccggtgggtgtgcgcgcggccaatgggcggtgcgcgggggccgggccgcggcggggcggggcagcggggcggccgccaatcgccgtggtgttgttgaaactgaaaatactacattatgctaatcgcggccgggcccgcgcgcacgggggtggggcccgcgcgtataaagggggcgcaggcgggctgggcgttccacaggccaagtgcgctgtgctcgaggggtgccggccaggcctgagcgagcgagctagccagcaggcatcgagggggcgcggctgccgtccggacgagacaggcgaacccgacgcagaagagtccaccaccggacagccaggtagccgccgcgtccctcgcacacgcagagtcgggcggcgcggggtctcccttgcgcccggcctccgccctctcctcctctcctttccccttcttctcgctgtcctctcctctctcgctgcccgcgtttgcgcagccccgggccatgtccgacgcgtccctccgcagcacatccacgatggagcgtcttgtcgcccgtgggaccttcccagtactagtgcgcaccagcgcctgccgcagcctcttcgggccggtggaccacgaggagctgagccgcgagctgcaggcccgcctggccgagctgaacgccgaggaccagaaccgctgggattacgacttccagcaggacatgccgctgcggggccctggacgcctgcagtggaccgaagtgg

SEQ ID NO: 49 - DNA, 1508 bp, Homo Sapiens
attctacaattataaacatttagtgtattttgcaaatatggcataacctgttggcataaaattccattgttccagaaaatatcggtaataaaattatagaaaagttaaagatcttcatttcttatttcgaagcgtttgggagacatttcagaaacggatgggaaatgttaaattctgcatgcctgcttatttttctttccacaccgactagatgtaaacgagtgtcaccaaaagtacaccacaggcacccacacagattccttccataagggatccacaaagtttagatgtgaaatgtaccctaaagggttcctagccgtctctcatccctccctctgtgaaacagggaagacacatgtgttttcaagggcagagatggaacttgggccaatgggccggggggtggggggaagttggaagggactgccttaggacatggcaggatagtggattgtttctgccgccttgttgcccataccggggctctctgcaggcgcgtcggctccctccccccctgctgagaagaagccctgccaaaacatccgcctcccccgggaacccccccgtgggttcaaagcgggaaaatgttgcctcaggtttaaaataatctgtccaagccccccagcgcgggagaaacgttcttactcgctctctgcccccgggggtgctccccgccctctgctgccagaaccttggggagtgcctagacccggggcagcacacgtccgggccaaccgcgagcagaacaaacctttggtgggcggccaggaagctccctcccagccaccgcccccctccagtgcctttttttccccccatacaatacaagatcttccttcctcagttcccttaaagcacagcccaaggaaacctcctcacagttttcatccagccacgggccagcatgtctgggggcaaatacgtagactcggaggtaggcatccgtgggggggcgccggctcgggcgtgcggggaagtgtccgcttctgctatctgcctctccaaatatcccgactgctgatctggccccccagccctctttccacttcggagcactcctctggcgttggcaccgctgaagaatgggcctgggcggggaggtgaagagaagccaggaatgttttatgttttcctaatggagagggggcctcgggagcccctgagctaggaggacacggaaaaggggattggggtcctgagattgggtctgttgggcccaagacgcgttttctggatgggtctaggatgctcccctgtcgcgggaaccccgcggtccggccctgcctgctgggggttcgaaaaagtggattgcagggtggaaggtgttatttacccgagtcctggggacagtccccgggactctccgccaagcgcccaaaacggcaggtccccaagcggcgcgcggtgtttttgcactttccaaaattcttgaaacatctcaaaaatccttctgcatcttggcgtctggcagggttttccaaaaaaagtaaacctccctcccaaatgca

SEQ ID NO: 50 - DNA, 1984 bp, Homo Sapiens
  unsure (9)..(17): unknown base
  misc_feature (9)..(9): n is a, c, g, or t
  misc_feature (17)..(18): n is a, c, g, or t
  misc_feature (33)..(33): n is a, c, g, or t
  misc_feature (41)..(41): n is a, c, g, or t
  misc_feature (49)..(50): n is a, c, g, or t
  misc_feature (52)..(52): n is a, c, g, or t
  misc_feature (54)..(54): n is a, c, g, or t
  misc_feature (62)..(62): n is a, c, g, or t
  misc_feature (80)..(80): n is a, c, g, or t
  misc_feature (84)..(84): n is a, c, g, or t
  misc_feature (127)..(127): n is a, c, g, or t
  misc_feature (157)..(157): n is a, c, g, or t
  misc_feature (159)..(159): n is a, c, g, or t
  unsure (175)..(207): unknown base
  misc_feature (175)..(175): n is a, c, g, or t
  misc_feature (207)..(209): n is a, c, g, or t
  misc_feature (214)..(214): n is a, c, g, or t
  misc_feature (1181)..(1181): n is a, c, g, or t
agcttcagncatcactnncatctttatcaatgnccttgggnccacaggnngngnccttctgnccaaacagcagccaatgnaggnatcttaaaaggcacatcactttatatttattcagtggttatgncatcacttaatcctcaccacaaccttgtgngntcagtacaatttgtgntttcattttatctgtgaacaaatggaggcagnnntttgngtaatttacaagtaagtggcagatccgggggctgtgcctagacaatgtggctccagactccttgcccctccctgccttctgctgcatcttgattgagtctagccatctatttctttaacacacactaattgctgtctccatgttccaggccctgtgccagatgctagaaatacatccccatccactggatcttggcatggtccattgctcagtgtcctgctatgttacgtgttacataatgcatttattccggtatttagcccatggaaaataatgctgaaagacattgtatgcatgtttctacaacaaaactatgtaacttatgtttcttttattgctttggctatcaggaagctcttatccaaatcagagcaaatacattagaatttgggcttgtcatttcagtttgctgaacttttccttctggcccagattttctattttggttcataaattctattgcacaaatgtcctttattgtaaaacaccttaaattctttctaagggaaggctgcatggaaatgatacagtaaggtcttccctgcattttcttagattcctattagggaaggcagacctagatgtccctcttaccctcagtcccaaagccccccatttataaaatcccttaagcagtgactactgctgttctgagtacctggaggtagttcagagcttctgaaaggtaaaatccatatacaaaaagaagttccttccgatccagatcccagctttggtgccagatgcacatttgaggagtaggtggctagtcagactctcacctgagcagttaataaaatctattgccccttaatggaattttttctgcaagctcgaattgatctgtcatctttgtgatttgtgagatggcagggaagcaccaaacaccatcatgacttgggccacagtggtgggaaaaaaggaaaaaagaaaaaaaaaatccactgccaagccttgccaggcgtanaaagggctggaactgctggggccattttatctgatttattggaaatagagtggatcttattaacattttaataaagagaatctttttgcactaggctggaagtggccgccagtcccccgtgcaattccattctctggaaaagtggaatcagctggcattgcccagcgtgatttgtgaggctgagccccaacagtccaaagaagcaaatgggatgccacctccgcggggctcgctcctcgcgaggtgctcaccccgtatctgccatgcaaaacgagggagcgttaggaaggaatccgtcttgtaaagccattggtcctggtcatcagcctctacccaatgctttcgtgatgctgctgctgatctatttgggaagttggctggctggcgaggcagagcctctcctcaaagcctggctcccacggaaaatatgctcagtgcagccgcgtgcatgaatgaaaacgccgccgggcgcttctagtcggacaaaatgcagccgagaactccgctcgttctgtgcgttctcctgtcccaggtagggaagaggggctgccgggcgcgctctgcgccccgtttctgcattcggatcgcccggcacgggcagggtgagggggctttcggggggtcggggcctccggtcgcggcggcgaagacagatcggggctcggtagggaggtcattccgagcccagagatcctaggcaccccccacacacaggctcccactctggcgtgcgtgcgtgtgtgtgtgtgtgtgtgtgtgtgtgtgtgtgtgtgtgtgtgtgtgtacgttcgttaacgggagga

SEQ ID NO: 51 - DNA, 17897 bp, Homo Sapiens
acattgcacaactcttcatttatgttcaaagtaaaggatttattacacatcctgaacatagcctacccttcaccctcatttggaattgttttcctttcatggttttttttttttttaattttcattgctcacaacatgatattacaggccaggcatgcttgcagataactgggataatttacttttacttaagtaaaaatcccagatggcagtccctccacctgggatcatgaagcaggtaggatccccttttccctcctaacagagtccaagcagtaagaccgaataagatgggatgaattcaaagagaaacatctgcatttgctcagttcttcaaccaatatttactgaacttctctacggtcaggtgtgcaagatgccaggagggatgagacaagatgatgatgatgatgatgatgatgatgatgatggtgatgatgacagtgaggatgagggtgaacactttaatgagagccttctatatgccagggactgttctaggcactttacatatattaacacatatatttatcacaatgaccctgtattgttatgtgtatcttatacatgaggaggcagaggaaggaaatgaaataacttgcccaagagcatagagtctgcaagtggcaaagataagatagaaataattctccaagagcagagagtggtgacttctggggatagggaagtggaaaagtggggagacaaaggctgttgtttttcctaacaagttttgaagacttatttgaccaggttcaagaaaaacttgataatcactacaaagtaaaaggaagaggagatgaggtgggcctttgggtacagatgcttgttttggaaagtttagggaggaaggggtgagaggaactgggctgcagtacaggaatgggggacttgggaatcagaggggattggttagggtgggtcattgattgcagtgaatgtttacttgttgattgggctgcagtacaggagtggggggcttggaattaagaggggattggtttagggtgggtcattgattgcagtgaatatttacttgttgattagtttgatccagaagaaagggagagatggatgctggaggagagagggggtcccgagggagcccaggactggaggtgggaagacacttttacggacactttttcattttgacagacagaaaagatgatggtctgcagcagtagacccataaattgtgattgaaaggtctgatggtttctctcactcgtttcctccatgcacagagaggtggagtaatttgccccaggtactacagctcataagtggtgaagttggagctgggggccacagaccaccgggttcttctccatgaatccctgctgcatcttggtctctcccaaccccgagtacccatgagttttaagaaagacagttgggaacaggtgattcctatggtcatttttggaacatttggttagaatattctagtataaaatctaagttgttgttaagtagaaatttccagtggacattagtccagaaaatccaatctcatcctgtgacggatttgcagcgcgtgtgcatttactaagcaaatctgattctactgctgaccagcgagaaagaggaataatgtaaacagtcagtgcaattgcacccacattcagctccgtgagcttctgccacctcagctggctgcggtgggggatgtggaggtgcatgcagctcccaggtcccagtgaggggcctctgtatagggtgggcgtcctctatgctttatgtgcatccaggcctgtactaaagacagtctttctcctgcagcgtgacacttagctaagaaaactacttcatctggtgctcagcggaagaaaacatccttttcaacagggaaggaaaattggctgtgttgggctgagggaggggagtgtggaatccaaatggtgtcttcctcaggccttctccaaggtgatgtggactctgattttagaatgccatcacttggaaaattgtgttccattgctcaaattcttgcctcccttctctgctcttttctcttcactccactctccttcctctgtcttctgacctattcaatgctaatggtcttccagaaggttaggcttcccacacaagcccagcctcctgccaggcaacctcctcggggtttcaagctgcaaatctgggctgctcttcgcattctgtcctgaggacctcctcaaagagacaggcaagggcctcccctggcaaaatgcccttctaattccatgcactagttccatttgttactgaagaagtgggccgccttccctgcgcctttgaacttgacattccttatcttgacactccgcacttttgaacttgacactcttgtatctttagcaggtaaaaaaccaaaggtgctcactcaataaatcgccgcaatggggagcctatgggaaaatgggtatgtgtaagctggctaaaggataacaggcacacaggctgcttgatctgggagggtctttagacagcaggatggctcccagagatgcacttttgttgttgctgttgttcatgatcatgtccccagggtctagaatggtgcctgggcatagtaggtccttaatatagttagggaatgaatgagttcatctcaaccacgctgtatggatggagaaactgcgtcttggggctgtaccatgctatgcacctgtagaaaatgtttttgccttttcagtcctttcccagtggcggagtacaggacccagctcataagagcagctcaattctgtcatttgtggaatgacagaataaataagtttcagggcctagggaggcaaggctcctgccttagcctcccaagtagctggaactacagctgcatgccactaagcccacctgattttttattttcttgtagagatgatgtctcattatgttgctcagacttttctggaactcctgggctcaagcaatcctcccacctctgcctctgaagtagctgggactacaggtacttgccaccaggcctggctagctttcatcttttttgtagagatgggacatcactatgttgtgaaggctggtctcaaactcctggactcaagagaggcttctgcattggcctcccaaagtgctgggattacaggtgtaagccactctacctggacacaacattttatttgaaataagaaaaattttccctcactgggaatgctgcagttgaactagttcaaatccataaagaatggaagactgcccagtggtcattcattcacttattaattctagatgttaaattttctagggtgggggaatgtgctcctacattcaaggcattcttgaatgtagccaaactttgtagtttagccaaacttcatagctaatagccaaactttgtagtttagccaaactcttctagcagcaaaacccatgacactggaactctgttcttcacactggtcatttgtaatagaataacagagctttagcactagataggttctgaaagatcattgaatctaatcctctccctttgccagtgagaattctgaagcccagatttgttgatttgtgatcgatagtgtcaaagacaggcctgaaacacagatgtcctgggtcctagaggtgctgtttgcccctctccatatttcttttgttccagaaaacccttctccaaaactggccctaataatcagaggggaaagccatggcccctgccttggggacagcatgggttggcacagaaaagaggtttacaattcagcaggaagtgttgtgcgtgcgcgcgtgtgtgtctgtggaggcgcagggagggtcacctgagcttgccctgggtctggtcctgggctcagtggcaaattcaacgctgggcaggtggcctgaggacaatgacggtgccagctgtgagtcagacttcctttattcataaaatcatgttcctccatgcagtgcttctcaacctggctgcacgtcaggagccacctgggtagctttgtaaaaaccccaatgcccagttggtttgcaccccctgagattctgattaaactgttctggagtccatctctctctttttattatctatctatttatttattttttaatttggcggctcctctgggacttctcatatgcagtaggggttgagaattgctggtttctttggccagatgggaacatgcaggccaatagttacgcacaaacagagcagcagagcaggacggtgctaaggttggaaagggtgagtcatgaaagttcaggaaatcagaataggaaggggtgagaatcctctcatctgggcttgtggggcaggagagaagagcccagtgggcaaggtccagtgagtgtgcttagaactgggaagatgaggggaagggtaagcgctgggcggcggtgggcaagatggacgagattaaacgggagcgaggatttcagcgagagctttggcgacacggaaggctgagaatcggagggagcctgtcgggcgaaagcgaaggcggctgctgggcaggcagccgaatccggctggagagccgagctggtgagacctacaggaagtgaagggagtcgctcagggcgtggcgcaacgagactcttagaagaaactctgaggcagagatggggggcctccgcccatacggagacacaaggaagtccacatgcacacgcacgagcgcgcacatgaacacgcacaagcacacaaacgcctcctccgggcagggcacacgcgcccgctgcacaggccgaggccctggactcggaggggactgcagagccgacccacaacccgggccccgatgcccctcccggccgcgcccctacgactgcttgcgcaacaggcggcggctccagtgggcgcccgccgcgcgctgccggagcccagcccagcccggcgcgcccgggaggagggagcagggagcggggaaggggtgtgtcccggctgcgtgctgggactgcgagggtctgggaggggcgaggcgcgggggcggggccgcggcgcctataaagtcgccctccgcccggacgtaaacaaacctcgcctggctcccagctggtgctgaagctcgtcagttcaccatccgccctcggcttccgcggggcgctgggccgccagcctcggcaccgtcctttcctttctccctcgcgttaggtaagcccgcgccctcttctcccaggcgcgacgcggagcagaaaggggccgcccgtgcggtgccgctggagcgccaggaccgccctttgtagccccgcgtactccaggagtaagcgccccggagctgcaagtgcgcggtcaccccggggcgcgggcgcgagggggctttgggtgcagacaccgctgaagtggggggttcaattacggaaagggaggaaaaaaagacagggtcccattcatctcccccctagctggggattggggttctggaggtcgggaagggggcgatgagacggtccgaaaaaataccaggatagcgtttcctggcgtcgtctccgaatcccagctggcgccgctggcaggggtgcgcgctggacgtgggtgcagaagggactaggtgagtgtgtgtgtgtgtgtgtgtgtgtgtgtgtgtgtgtgtctgtgtctgggaacggagagattgcgcgcgagtgtgtagatgaggggttggtagaggtgagtggcgctggcaaggaggctggagaggggggcgtgggtgtgtctggcttgcagactgggtcgggaacgggtgtggatccgagaggctggtggcgcttcagtcccgtagcacacacagggcggtgtgcatgtgtgagtgtaagcgtgtgtgtggggggagggtccagggtgtgtcacagtgcaacacgcgagccggagcaagtgtctgcgagcgccactgggcagggtgcgcccccggaggaacccgggattggcgcatcggcggcgtgggagaagtgacctgggcgagaggggtctcgcggacatttggcggccccttgagctggctggagctaggagtggcgtcattttcgcctccgcccaccctcccccgctttcctcccctcccctgcctctggtgctggccgctcctgccctccacgggggaaaacagctggaattacttcgacgttcctgggggatccgccgcggtctctgattcagcctcgggaggagatttcgggctgggcttggggaatgcggctggttctgggggaaacacgctgtcacgcctctgtcaaattagtagctggagctgggatttagtgggtcggttccttacccacccctcccccatatcccccgcctgttgtccctgctgtccctgggggtcctgaacagcacgcctctgtggcttggaagtgggagatgcctggcagtgggtgggggaggcagggcccttggttatcttatgcccatccaagaacaccccttcctcacggacgctgggggcacttcagtttgtttggtttctttaagctactgggaaatatctaatattcagaagtcagccagtggccaggcaggagggcggtagacatccttataatacccatcagctgcacgggaccttctcctaagctgcctcaaaagaacatatctaaatacaaaccccctgttcttgctgcagaaatgtagtttcaaggcgaatttttcagtctagactcttcctgttgagaaattctggcgttcttattgagtttcacaaatgtgattgaaataagcaaggtacagagggggcaaaccccagcgcctttcttggaagggctgccttctggtggggaagacacacggctggagacgcagaccggttctgtgtggtgtgtgtggcggcagagccagccccaggctggggtggcacagtgtcggggatgaaggaaggtgtaagggagagagagggttttggtgtggatggaaaactgggtgttcccctgacctgtgacttcttagctttgtgggaccgtgtctcccactgcatctgggcaaggaggaggatttgcctgccctgccctgtaacctggcccctggcccagcgcctggcaggtgggaggagttgaaatatgcacatgggatgaagtggatggctctgggtcttctgccccattctcctgtgaaccagcaggttgagtttcgggcgaggtaatagactgtgcatgggtggaggtgttggcttttgcttttgagggatcctggagtgtctgtttgggtctcttgtgaggaagttcttttggagcaacaaagtttgatcatttggaatggaataaaaaactcacacaggacctacctagtccaacttctttccattttacagatggaaaatgaggcacagggatggggagggatgtgcccaggccgaactgagctggagctcagctttgtgagaggctcctgggtgggactgaaggcagtggaaagggttcctggcaggattttgcctgcctgctatggaggggcgaaaggaaattgcatcttcattgaatttctggtgaggaaacttttgaggccaaaggggcagagcggaatgattttttttaagtgtaaatcaggtgttcttgagagattagcaaagccagcctgaagggcaggggcttagaggctgcagccccctgagttggcctttgactgaatggggctgccccccccccatgacagaagacagatctcaactgagctgagggcccccctgggttacgttgaaatccgctggcctgaacttgcctcctcatggacctgaaagaaagatagcattgtgtttttcgggtggcccaaagctgcagttcttccttgggacccaaccccagagaatcccattccagatgtgactcagaggccttgtcctgggagagaaagcgtgatgactcagcatctgagactcaagcagggttcaggtttgactcagcctggaaggaaggccagggagggacacgacatctctctccctccagagcagccactgtctccctccatctgccttcatcctcgcaagaacgttgcctggatcgtattgctccattgaatggatgaggcaactgaggccaggagagtttcaggatttgcctgttgccatatggctcaggtgggagagccagactttgaacccggacagttggacttcagagcctttgttttttttccatgacaacatgttggggcgcctgaagaaatcaggctcaaatgaaaaggcagtcaggagctccatgcctcagtttgcttttctgtaaaatgagagtaacagacatgatgccatcagaatgtgtaaatattaatctgtgtaacctgagaacagcactgagcatgtggaaaacagcgtgtaggtgtttgccgtcagtagcacccgcagaagacattctcaaggcatcttcttggcaggcagagtctgggaccctttgtcctaaacctacccaaggctgtgaaagtgcctgcaaatgcttgacctaggtattgctttttgctaagcttatgtaggttgcataatagtgtcatgaaaatcttgtctgaaatgcacatttccaggcccggtctcctgcgattctctctccatcaggggatatgctgttgtttcaaagctcctttggctgggttgggaatggggtatcctgcaggcagacagagttgagaacctctgctctggaatgacaggggagagaagaaggaaggtgtagtcatacatgccgctgtaccttcaggccaccctgtgtccacagtgccagggaattagtgagtgctcagtaaatagctcttgtttgctatagtgccttggaggttcaatgcatcacatcagctaactgaggtagaagacattctttccacctctcaggtcagaaaattgaggctcaggctggtgactcttctgtccagagtccagtgagtggggttctgcccaaggtgagcctcctgagccctttccaccctccaacattgcgcttggaggccacccacaccctctgggcccaccttttgagaaggagcttgtttcctggatccaccccaggctgttgttcctgcctcccttgatggctgtgtgatggaagtaccgcgtgtccacttgctttttatctttcaacttggagatagaggcaggctagatagcggtcttggctgagaacttagcccaggcaggtaggcagaagggctggggacactgaggccccacaggaaggcggctgcagaggtagagggccatgagtaggtgccaacctggagccgtgttctcggggtgggggccatgtgaaaagaaacctgggctccctcgggtggggcgtaagccccagcactacagaatgggaatggattacacaatcggggccataagcaggtctctttgacccagatctttgactttcccacctaacattgtttgcagacctgcctatgccctacctgcctgggctccatctctgaccttttgagtccagcgggttttcttgcaactgagctggtagaaagtgaggctccttaacagtctgggggccttgagtgccctccccagcagtttaatctttcctttctttaaatctgtggggagactttctgcagctatacattttaaatctgcatagagttctgtttgaagagaggtgggtgggggcccaggtctccaccttgttctcctgccttcaccctctgccccacccccacggaacctaagaagattccaagtaaccctcttcaaatatggatgtgagagggccatttaagaggtgggtctatggcctctctcagctgggaatgcttaccatctctccttcctcctttttaatcatggaactctcctcctttctccagaaaggcctccttggctgtcctctgctggaggggaggctgggttgggtccttcctgggacctgtccatgtctcccatgaaacctgagagcctgtccttagtaggtgttgtgttagtggtggtggaaaggacatctccactgattaaggaagtaacttggaccatcttgcatagacaagatcggaggcccattccggagggtggaaactgcaagaccattctggggaaggatcctgttagcgtggctagcatcccatctcgggacaaagggttctgtatgaggaagccatttcctcgtcctctgctaacactggctccgtttgtgtgatttccacaaattatctcagaccatccagcgcagctcatgcctgtcttgcaatttcacaaaataatcctctaaggagaccagtgtcctcctttggacttccagttattcacctcgtcccctcagacggtcgtcttctgtctgccaaacaaattactcgtgctgccaaaactccactgagaatctccaggaagatctcggttgtattgcagaaaagaggtgggccctgacgagattcctgacacctccctcttcctgctgttgtgtttgggacactcttgctgacctccctggtgctgtgctcaagttgaacacacagcagttcagtttcagctccagcccctctggacccacacccagggagtgaatgcggctttggcttgtttgagagggagacagtggggttcaccttcttagtgatccctttttcattccttgaatatcaaacatcactgatgcctcctgggtttcaggctccactgcaaagtacaggggccctcgaggagttcctactgtggttttgttctctgacatttgtactgtttccttgattctgattgctctgatacagttccctaacctctaaactagggaactttcttgaaggtccagtgaatccacccatattgtttgctgagttgattagttaagaaagacagttcgtgaagactgccaacttcctcaccctccccagggccttgagtttcagaagggccagaaaacaccaagagagcccatgaactgctttgtagcttgacttcaaaatctctttgggcaaagaaatgacaaaggattgtatccacagtaaggcagggctatccagggcctatctcaaggtggttttccttgaggttcaggcagaaatggtgctgttctcggcaattttctggggaagttgctacagcaaacagccacagcacatgttgattttttccctccttttaaaaatctgttctataaagagcacaatgtgctggagagaacactggctttcatgtggccttaaaaccaggcatgttacagagggtggaatctgggccagttgctgttggtgacaatcgatgctacccttgtcagcaattcccgcctgctctccctttatctgcttcactgaaggcctccaggggactgttgtccgccctcccccgagggaatgagtgccacacctgcacccacaacaaaccagtgagtttttcacctttccctcagtagggaggaatctagacatgtggcctttggaagtcaagtgggcctttgtgtttgtttttgagcctcaggttacccatttgtgaactgggtataatacccagcctctcccggggcaacctccttgaggagcaagtgaaacagtgtgctgagtgaatgcttttccaaagcattgagttggccgtcttaggaaggtactatgggggagctgaaaacagagaaccttctgggtgttgtgaagggagaaaagttcaagatgctggttttgccaaaagctcaagcctgctcatgatggctcagtggtgactgcagggtggaggagaggcatgtgactgtcccagctgacctccacacgctgaaagcctcatggtcacgtgcagcccaccttacaacgttgtatctgggccacgggtggtggtgaggactgtggatatatttagggcaatgtgagatcattgtcaacattccctttaaggttgctttaaccttaaagcagccagcttgatgcttgctgacttggggcacacatcttaacctcttgatgcctcagtttccccgtctgttaaatggtgacatgctggcacctccctcctagggtttctgtgaggcttaaaggaagtaccgggtttagagtccagttagtgccacagatactgttcctggtgctgtttttgtggtgtgtctgtgtagggttacattgttgccttcctgtggctgctcttcctggtgggcggaacctggaacttctagaacagatcatggatgtttctctgctggataccccttcagcctcaccctgtgggagttgtggcggggcccaggagagtttgctcaagagggtgtgcaggtgggtggcagagctggagcaaggcactagtcttaacagacaggagtctgaggctggcagaagtgggggccttggtccaaggtgcggggctaatctggccagagctgagcctggcagggccttggtaagaccctgtggcccttttgtcttggtgaagcaccttcctgcctgggtttccatttgcctgtaagtttgttgtggacagcgtgatctccatagacgtacactgtgcctactttacagatggagaaaccaaggcccagagaggaagtgacttgctcagagtcatggaataggaaagtggcagggtccccatgccctgattcctaggccagcgttcctgctgccccactgaggtttttgggaatcacaggctctgtgtgtccccctcagtcccccaggggctgttgaacagttctcaagtggtgtcggattactgaagatgcctctgcccactgccctcccaggtcccagggtcacgggtcacgttcttttcttcctcgggcagatcctggccttggctttgcctggcacctgtgatccagctctcctctgactctcctgggtctgctggactggaagggtatttgtgtagcccctcttgggccctcattactcattgacagacagtgctggtggagagaagggccccagtggtgacgcactgggcctgataatcagaaaccttggtggcatttgctgagcattttccatgtgtccctctcctcgctgggactctaggactgaaacccaggccacatcctcacagatgtcctggcatctccaaggcaaccctgaaaggaaagtatgttgatgaattaagcaactgtttgcttaattctccatgccattcttgaatttaagccccactgctgatcattgggagcaggagttagcatgcccattgacagacaagcaaactgaggcaaagaggttagatagccaggcatggtggcatatgcctgtaatctcagctactcaggaggccggagtaggaggatcacttgaacccaggagtttgagaccagtctgggcaacatagcaagaccctgtctctctaaaaaacaagatgaataatacatttttaaaaagagattcgataaattatgcaggatcacagagctaataaatggtgacaccatggcctgcaagccttcccccagctcctggctacctttcgcttctctggcattggtcttctcggaattcctcccaggcaggtggatgggaaaagaagtgaagatacaggctggcagctggtgctgtgacctggagccctgtttttggtgctaagctgggttttagctgaaggagacctgctggaggggtttcttctgtgcttcttggggagcaaagatggccttggagatggagacacggtttgtcagtcccaagccactccaaaggtggggctggtgggctaggagtcagccctggttcccccgccatgctgtgtgtggccctgccttgccaccccacctgctggaggacctctttgatgctttctagtgggtcccaacattctgtgattaggactttgcatgaggcagagggagggcaggagctggagtccagcaaggacctcaagcccagggacaggctccacctgccacacttgctaagccgtgagggcctcaggtgcccgggaggagggagcaggagtggaagcaccagctcgagccgccaaaccaggtcacgtatcacctgccatttcctgctggcagaaggagatcacagacaccagaagacagcagcttctgccagaactgggtccttccatgattctcaggtggtgactttgaatcccagaaaaagtgttttggggagagtggagtgaaggaagagtgtgaacattggatctgactccactccagcccctgtgctgcagccagcagggtgagctcaggacagctggcagccgcttgggcccagccccctcctccgtgaatgaaggtggtggggagtgcacgtgtgcgtgtgagtgcgtgtgagtataaatgactgtggatgtgagagtccatgaaagtgagaatgtatcagtgtgtaagaaagtgtgagtatgtgagaatgagtgtgtttgtgagaatgtatgtatgtgtgagtataagtgtgtgaatgtgagaatgtctgagtgtgagaatgaaagtttgcaagtgtgtcagtgtgagggaatgtgtgagtgcatttgagagtgtgtgtgtgtgtgtgtgcgtgtgtgcacgcatgcactagattaaataagaatgcatccaactgacattttctggatactgttacctactaggaattactaaaatcagctattccagaggagggtggatgtcgcaccaggggacatttggcaacgtttgcagattcttttgctggtcgcagcgtggggtgtatgctgtgggcatgtggtgggcagaggccagggatgctgctgagcctcctcccgtgctcagggcagcccctaaggcagaggctgcttgtggggcccaaatgtcagcagtgctgagctgaggatctctgtccaggaggcacagacgctgtcctggatgctgtccagacagcatctgctctgccctccagggggacagacagacagtggacacagcccagatgcagcctgatgagtgagcccaagggagtgcctgtcccctcgggactgtgagctccgtgggggcaggaactgggtctgtttgctcatgatccccagatgagtcccatagccagtctcatcaccatagctggtgttatttttgttctgagctctgtgttgggcacatagaacctagtgggtagaaacctctgaataaatcctgagttttccatcctgcttccgtgaactcagatgttctttgagggccagcctggtggcgtgggggctgggagtgggcagattgtagggagccaagtcctggggtggagtggggttcaggcccctttccctggcttgagccgaagcaccttggctttttaaattttaaaatttttattttttaacatttttatatgttgaacttccttacatgatttcctttggataaaagctcctgcaaaaaaagtttgaaaagttttttggttgaggcatcagggacaaggtaagggctgcttgatgggcccaactcgggagaactgaggtgagggagccgctctcctcccaccctacaggctggccagatggtggaccgccagcagctggctgggtcaacctgcagagagcaccttctgcagtccttggttcatgcggccttagtattgcaggacgcgaccaacatgcaggctaccccgaggcctgcagcccccacagtccccccagactagtgcaaagctttatccagtctcccggcagacttcagagtctaggacacttcctaaatggttcaaaatcaatggaatcatttgggggacaataaataatgtcactagacattgccaaatgtcccctgggagagaaaatcccccctagtttagatataccccgtgatcatcctcagcagttttatctctggacttcccaaaggcctttagcagtgagggggctgggtcagagaaggccccaccagctcccaaaagcagatgctcaagaacttgatatttctaggacacacagcgatttttttaacccattgcctcatgtggtctgggaagctaagctgtaggaataaaaaaggtgccgggtagggtaaagaggtttcaccagatagaggaaacggggaaggtggacatttctgtcttttctgttctggagaacgagagagctggtggagactgacagacactatgtcctaatgtgatcacggtttctggaagccaaagagaactgaccaaactgggctgaaccacagcatttctcgagtccttttaaatgtagaatttgttttccagacattgcactcttggggtttagcaatgatttaaaagtgaattttactgaaagcatgctgttgagctacattgctcatttattcagagagggagttgcagcctgactttctgcctaggagagtctctcgtgctgggagctagaggtagagaaaagaacaagctacctgcttgatgaagctcacagataggactgcttgaacccacctggtgggacagtgagagccccctgacttcaccctggcgcgctttgctgagcagggtatgctaagaagctcctgtgaaatgagaagtcctttcactcccagaatgaggggtggcgttggcagggccctgggtttctggaaggctccctaggccatgtaggcgaggtgtcccacaggccagggtcttgggaccacgaacctgctgaattagcaaggctaacagacgcgggcctttcatgcctcctgcctccaagctggcagctgcccaggaatgctcacaaatataaaaccgactttgttttcagaatgttctggagcatagactccaaagtctgtataaagccattcttgtggggctggttatctactggggaaaatcatgctggggccccagaccagagcaccccagtggagagcaggatctgcccacggaatgccatgtgttggcacaagggatggacccggggtggattcggggtggcccgcacttgccggctgacctctaagaggtgtttcaccaggttcttgggagttcctgggtcttcagaggagccctaggcaggaatttcagaggcttgcattctctcgaccattgcatccgaggggccttgggcagtgcggggcccaggttcccactctgaagctggctgtgtgagggctttggtcaggcgttttccattcagaaagtctggatctgtgaactgggtgggtggcctgggctcttccctcttgtcacttacttcttctccgccggtcctctgctgctgtctgtaagacttgaccttattctgcattttttatgcttcaccccagggattgatgggcatttagtttttctaacttgactactgatctagaagaatacatgcttatacttctggtttctagattcagctcttggaggcatgcttaatagatagcaccacctgcccaagccttgcaccccagggagtcagtggcagcattccaagtcttcctgggctgtgcttcagtctggttttgcagcccacacttctgcacctgccctgtgttagagcacaggtaacccctctggtccatcccctgctttgatccaggaagtgctttctgccttggaggtcttttttcttacaaaattgtactgtgcgttcaaatgcctgccaaactccttgacttaaggttttcctctgcccctcttcccttttagcaggcagccgagagtcctgcaccgtggggtgtgtatgtgtgttcacgcgcatgcgtgtgcctgtgtgtctgtgcgtctgcatcaccaaccttctgttagggctaactgtgaggctgaagcttgcactatgcctatacgtggtaagcatcgtgtgagcttgtgttcccctttcattgtcacacgggggctgcctgactttgggatcagcaatgcaggtccccttctagaatgcagtgagctgcatcctgggtatggtgggtgggcctgaacttggtatggggacctgtttgtgaggctgatctatccatttcattgggagggtggtgtctgtgagcctcagtatcctctcccaggaaatccactgcgctggccccaatgggaagactgggttgggtccatgggctgtgtgtacaagggacctcctcatcccctgcagtgcatcacgagggaggtgaagctgctgggcagagcgcaggcctggccttcttgccattggtcttggatttgcttcctttaggaaacctctcagcaggaagtgttgaccttttggcctttgtctccttgcagg

SEQ ID NO: 52 - DNA, 5987 bp, Homo Sapiens
tttctaacctgtatcatttttcttatctcaataacttcttttaacatttctcacaaagcagatctactggccacagaatgcctcaattttcatttgtctgagaaaaccttatttctccttcacttttgaaagataattttgtagggtacagaattctaggttgtaggttttttcccctcaaagtgaaatatttcattccactcttttcttctttgtatggtatctgagaagaagtcagatgtaattcttatcattattacttaaaagattgcttctgttcctttctctcttctccttcccttctttccttctctgtatattacaccttttatagttgccccatatttcttagatattatgttttggttttcttctgtgtttttttctttgattctcagttttagaagtctctatttatatatctgcaatcgcagggattctttcctctgccatgtccagtctactaataagcccttacagacattgttgacttctgttccagtgtttttgatctctagcatttctctgattatttcttggaattgccatctgtctacttacattaccaacctattcttgtgtgttgtcttatcatagtaattgcagttgttttaatttcataggtattgtaatttcaacatctctaccatatttgacattgattctgatgcttgctctgtcttatcaagctatgtttttgtcttttagtgtgacttctaattttttgttgaaagccaggcatgatgtactgagtgaaagaaactcaatacattgtaatgtgacgataagagttcaggggaagtgaagcattctatagtcctatagcaggtctcggccttttagtgagcctgtgcctatgaacggtgactttcaacaagtgcttttcattccactcttttcctgtccttaagtgggacaagatcactgggggggggctagaattgggtatttcccttctccaatgtagaagctaaagagagggctggagttgggtatttttcttcccctgtatggaaagctagaggcagttaaatttggatattttccttcttctaattcagttaggctgcgacaaaaatcccgacagtttaggctctaatattataaaataatttctcttgagtataggccttattaagaacactatactctgatggagctgagggggagttttctctgatattcactgcgagaacctcgtagagctccaggaagcaaaactcacaaaagtgtgggagtcttccagaatttttcctttgcagacttatctgcactgaacctccagaaattcatcaattacagttcaggttttcctacccaggtactggttttcatggaggtttctgcctgtgcatttctgctccagtaagttgttcttcttgtatggtctgtctttcaaattttttaagtagggttatgacctgtcgcctcacttctctgacagttctgagagtgttgatttttcagtttgcttagatttttacttgtttttaggatgaagtgacaatttccaagctcctccctgacatgccagatcagaaactgaaagtcctaagcctcatattctgtgcgtgggtatgttcacatcctgcctgctccagtgcccccacctcacactctctttcccttccttgtccccttgtgagatttctaggtccaatacaaagactgtgttcaactcattcaactactttggctcatctgagtattataatgaacaatcacaaaaaaaaatgaagtaaaagaaaaatccatcaaagaattgagatatttgagaaaaagaaaggagatcagtgttttataaaacttagaaatagattttttaagtgtttcttcattgacttatgtgaaaggacttttcttaatttaacaaattatgtgctttcgtttatagcctcaaaacttcttgtgtagctaagaatgggtaaataatcaggctttactaaaggactaacgtaaagatcttctgtaagtaacatttctgctactcaaggaagagataaacttcatggcataaccttgccaaagtatactaagaataaccctgacacaaagctcttttttcagccaacatgccatgaaagaaagaagacaaggggtgatctccactctctaagtgaaccactaaacccaccaaagaagaaacgagggaaatagaaagaggacccttgcctgagataatggatctgtatgtatgagtagtagaaccctgctcaaagtacaaggaagggaaaaaaaagttagtttatttggaattttggacattaagagtctttattgttcattttcttttaactcacatgaatggcttatcacttcaattaataaatatttcatttcttttcaacatattcatgaaacaaatctgaaatgaacagtgcaacatgtgaatgtttagaacattataaaattaaacacaaaatctgtctggcaatcttcctagcatcttaggaaaaaagttgacaaaatttcaagcagcagaagggggcagtaaaactcaacagaaagctctggaagatttttaagattcttccttattttcttttcatgtagattatttcccaacaaatttcagacgctaatagaaattttgtacaacagatccatatatttgcctaaaatagacacagaaacattgaatatatgcaaacatgagagctataagttttacatgatcaaaccttttttttatggtacacaatagtcacagtacttttccatataaaacaggtttagtggtcttaatttagtttggcacatttaatacactcccatgaccagcatcccaaatgtacctatccgttttattttattgtctcagaattgtcagttatttaataaattatgtaacttttttccttatgctcagatttgcacttctttctaaaactctgcccatccttaaagtcccagattctccttgaacttttttttttgactttccaagtacatggaactcttcactctatcctgctatataagtgacagaatttccactatgggatagatggagttcaattcctttgagtttaaaataatctaaatataattattccttatgccctgtttttccctcacttttgtatccaaatctcttttcagacaacagaacaattaatgtctgataaggaagacaatgatgatgatcacttcaaaatgaattcaggattgtaatgtaaaattttagtactctctcacagtatggattctaacatggcttctaacccaaactaacattagtagctctaactataaacttcaaatttcagtagatgcaacctactcctttaaaatgaaacagaagattgaaattattaaattatcaaaaagaaaatgatccacgctcttagttgaaatttcatgtaagattccatgcaataaataggagtgccataaatggaatgatgaaatatgactagaggaggagaaaggcttcctagatgagatggaattttagtcatccgtgtctcatgaagaatcagatgtgtacactaagcaaaacagttaaaaaaaaaacctccaagtgagtctcttatttatttttttcttataagacttctacaaattgaggtacctggtgtagttttatttcaggttttatgctgtcattttcctgtaatgctaaggacttaggacataactgaattttctattttccacttcttttctggtgtgtgtgtatatatatatgtatatatacacacacacatatacatatatatattttttagtatctcaccctcacatgctcctccctgagcactacccatgatagatgttaaacaaaagcaaagatgaaattccaactgtcaaaatctcccttccatctaattaattcctcatccaactatgttccaaaacgagaatagaaaattagccccaataagcccaggcaactgaaaagtaaatgctatgttgtactttgatccatggtcacaactcataatcttggaaaagtggacagaaaagacaaaagagtgaactttaaaactcgaatttattttaccagtatctcctatgaagggctagtaaccaaaataatccacgcatcagggagagaaatgccttaaggcatacgttttggacatttagcgtccctgcaaattctggccatcgccgcttcctttgtccatcagaaggcaggaaactttatattggtgacccgtggagctcacattaactatttacagggtaactgcttaggaccagtattatgaggagaatttacctttcccgcctctctttccaagaaacaaggagggggtgaaggtacggagaacagtatttcttctgttgaaagcaacttagctacaaagataaattacagctatgtacactgaaggtagctatttcattccacaaaataagagttttttaaaaagctatgtatgtatgtgctgcatatagagcagatatacagcctattaagcgtcgtcactaaaacataaaacatgtcagcctttcttaaccttactcgccccagtctgtcccgacgtgacttcctcgaccctctaaagacgtacagaccagacacggcggcggcggcgggagaggggattccctgcgcccccggacctcagggccgctcagattcctggagaggaagccaagtgtccttctgccctcccccggtatcccatccaaggcgatcagtccagaactggctctcggaagcgctcgggcaaagactgcgaagaagaaaagacatctggcggaaacctgtgcgcctggggcggtggaactcggggaggagagggagggatcagacaggagagtggggactaccccctctgctcccaaattggggcagcttcctgggtttccgattttctcatttccgtgggtaaaaaaccctgcccccaccgggcttacgcaatttttttaaggggagaggagggaaaaatttgtggggggtacgaaaaggcggaaagaaacagtcatttcgtcacatgggcttggttttcagtcttataaaaaggaaggttctctcggttagcgaccaattgtcatacgacttgcagtgagcgtcaggagcacgtccaggaactcctcagcagcgcctccttcagctccacagccagacgccctcagacagcaaagcctacccccgcgccgcgccctgcccgccgctgcgatgctcgcccgcgccctgctgctgtgcgcggtcctggcgctcagccatacaggtgagtacctggcgccgcgcaccggggactccggttccacgcacccgggcagagtttccgctctgacctcctgggtctatcccagtactccgacttctctccgaatagagaagctacgtgacttgggaaagagcttggaccgctagagttcgaaagaactccgtggatattccagctttcccacaagcactgatcattatgagccagttacttaaccgatctgagacactctcacctcctaaatagggatagatgatactaatttgcaggttgtcattatgataagacaggatctgatcaatatatgtgaattgtttatatttggaacctttttattgagtggaagaagttgttttaaatattctagtcagttctttcctgctcccaggaaagcccggattatgttttaagataagcaaaatgtcttaaaagtaagctgttttactttgaatttttccctaaatgttgattagtgtactagatccattttaatttggaaagtgaagtgctacttatttgaacttcttaaaaatgctaattttaacatctaaagagttaactaagaaaagcttagtaacatgatgtaccaagttgaatatgctgttatccttatttagaatagaaaattggtatttctacgttttatccattctaaggcaggttaaaaaattgtatttccatgactacctatatatttcttgaatttattattgtaaagttgattcatagtcaaacaattaaatgtttaaattaagattaagacactagagaatgatttatttgctgtcctttaattgcagc

SEQ ID NO: 53 - DNA, 5683 bp, Homo Sapiens
atggcaaacacttgaaaaagcttccacgctgaaacccaaaccagaccatatttaggatgccccataaggtggcattttttactaagatgataaaggataaacattggtggagccagagaggctgctcccaaatacagtcctccccatcagcaacactgcagtagcctgcacctatcgtccagagtatgaaaaagacttttgccaaagacggcttttggggatttatcattattacatgttaagagcctgttctccatgtcctcaccttcctaccttgctaatcttccccatttccatctttcggcccagtgtgagacctcaccatctccttttcccatcttctttcctccatacccttggtttcctagcaggtcaatgcccctgccccttcactggaatccatccatcctggttattcttttctttatgaacctgctggactacatctcaaagttacccaaaagagggatacaaagacacaataaaatcggaaataacgctcacccttaccagcctgcagttaagagtgtgtggaactagggtggctgcaggcaaagagatagggggaagggctgcctcatgccatgggcaggacagtaaatggtgcaaattttctggaaagcatcttagtaatataggtgaagagcctttacaatgtgtttatcctatgacctatccttacttctcttattctaaaggaataagaagaggtttaatcaaagcatgagtgaaaaggccatccaaacacagggaaaggggccgttatgatgtctacggttctaagaaatagaaaacaacaacttggcttaaataataagcacataaccaaagaaatctagaagtaggattcccttaagagttgagagatttagcagctcaaaaatgtgacctgacatacgagttctttctatgcttttgttcttcctcctccaacactggtttcacactaaacttggctccccagtggccaatagcaccaaacagcacttatcggcattcttgttggtatccaaaagagatggagaaagcctgatttcacatggctcttccttaaaagcaacaaaggacttttcccggaagccttcagcaaacctcgtcagatttgaatcacatgccaattcctaaatcagtcactggcagggaagtgggaaaaaggggaggaggtgtttacccttaaccaatatgcctacccctgcccactgagatcaattccataaaagtattgcttcagttctttgaagaggagtacaatgtttgtgagtcactcaccacatttacccaccaagagctaagggataactgagtaaaatggtagagctggtaggaaaatggtgagtagtcccgtccttctgtgccataattgacttgtacacaaagagatttggaaatttaaacataagaactctctcttcccaagcccagggctttgggcacttcaagtctggtccttgcctgggcacagtggctcacgcctgtaatctcagcaatttgggaagccaaggagggtggatcacctgaggtgatgagtttgagaccagcctggccaacatggcgaaaccccaactctactaaaaaatacaaaaattagttggatgtagtggcacacgcctggaatcccagctactcaggaggctgaggcaggaaaatcgcttgaatctgggaggcaaaagttgcagtgagctgagattgtaccactgcactccagcctgggagacagagcaagactccatcccaccccccaccaaaaaaaaattctggtctttacatgtgaaaaaataaaagctaatttttaaaaactaaataataaagagtgttaggtgataagttttatgatagagataatgtgtgctttaaaacacacagcataaaacagatggaaaacacctcatggagaagggagagcttgaattggtgtttgattgaaggacaagaaaaatctgttggtaacttcctcctggctctgacctctgatgcagttaaagtaaagcaacttagaattatgatctagggaacatattcagagagaaatgaatttatgatgtcttcaatttgaagatgctatgattttagactattctagaatacaatgatttttcattgcttcacacttgtaagaaatgttccactactgaaaatttgcaacacttaaaaaattcctacacaaaatcacagcccaccttgctgttctatgctaaataaacaaaatattttttctcaattatgttgctctccttaattacacgcaattttaaaactagctgtaactgacagccctttcctcacacttactgccaatgtatttaggtcaatcccacctccaattagagaaacttagaaaaaggaaatcctacggtgaaatgccatatgccttacaattttcagtaactaatcctcaaggatgacaacttggcaaaaaagagaactggaccagctccctgaaaggtccatcacttcggcccatgttaattgattgccttaaaatcacagtgcttccaggttgtagagacacactcaaaatggactattgccctcacattaaaggggataggttttcttttcccttttcccatccctgcttctctcaaagctgcacagaggtatatgaggtttggggaatatttgcagcacatgttggctggcaagaatgtgggtgaattcctgttaaggggcgcagacactccctcttctatgacctttcctttccacccagaacaactgaagtatcatgataagaggaagggctttgtgtttgagataagcagctcctatacctgtcagctttctctaataagaaagctctttcctgccaccgtataggtcaccttcttattggtaaagcatgatgaagtttggaaactgttgtccttgttttgttgaaagaagccaagttccaagaaatctgcagaggcattcctacaatccctcagccatggcagcatgaatcctgaaggggcagtgagtgctggtttctactctgtctgcacagctaagcctaggggagataatcttttcatacaagatgcattctgcttttgtgggcctcttgcagccctcaagcccccatctgatttgtacacaatgatccagtgggccagaggagcccagagccatgagcggcccatccctccaagaactatttctgactgtccagtatcatggagcaagtggaaagaagaaaaaaaaaacccaattacttttcgaagagcaagatgaatgctgtagaaggagaaggaaggggagggagatggatgggtgccgattccagaatcttcagatctgcttggatgaatcattacctatgatttgcgggacaagaatctgattttattcatcaaccagtagaaacttttctttctgcctcccaacatctgaaatccaacaaacatgtgccttaggaacataccggtcatcttttagaggcattttatatacatattgagtaactagaaaacactctttccgtaatacacacacacacacacacacacacacaccatcttgtcatacaacactcccacgcaagaaaagcgaaactgctgtttgatgaatgtaaacacttggctgtttgcagcagtcgggagtcctgccaggtttaagtgctaagatgggaggtgaaccccaggggtttccccctgcccgtgctgagatccttatttggtcaagcttctacctatgccctggcctcggagcgagcccgatagcgctggatcacagcagagggagcgaggcggctgacgtcccatcccgaagagatgaatggaattccaggaagctagagtcatgctggcttgggacagtggcttggagaccagacttcaatgacagaagcactaggcagcggcactcatggcaatgtgtgcacccacagaaatgtaacccacacctcgggttcaggagccgaaaaatgaaaagaacgtttagggaggaaaaagggaaatacaataataggcagagagtaatttattactctatgggtctgctctgtaaatagctgaagactctggagccagatggttctgcaaattctccaaacaggagtcacgttaagaagcacgagtgggcacaaaaactgtttttcaagacacaatttcaatttggcttgtggaaactggatacgagtaagtttccttaaaattcgagtagaaagcagctgtcctccccgggccccttgatgagaatacgcacaccgcccccaagcggccggccgagggagcgccgcggcagcgggagaggcgtctctgtgggccccctggcagccgcggcaggaaagggcccgaaggcagcgaaggcgaacgcggcgcaccaacctgccggccccgccgacgccgcgctcacctccctccggggcgggcgtggggccagctcaggacaggcgctcgggggacgcgtgtcctcaccccacggggacggtggaggagagtcagcgagggcccgaggggcaggtactttaacgaatggctctcttggtgtcccctgcgccccgtcggcccatttttctttttacaaaacgggcccagtctctagtatccacctctcgccatcaaccaggcattccgggagatcagctcgcccgaaagcccctgcgccaccccgcgggccctcctaggtggtctccccagccccgtcccttttcgggatgcttgctgatcaccccgagcccgcgtggcgcaagagtacgagcgccgagcccgtgcgcgccaaggctgcgtgggcgggcaccgacttttctgagaagttctagtgctcccaagccccgacccccgcccccttcactttctagctggaaagttgcgcgccaggcagcggggggcggagagaggagcccagactggcccccacctcccgcttcctgcccggccgccgcccattggccggaggaatccccaggaatgcgagcgcccctttaaaagcgcgcggctcctccgccttgccagccgctgcgcccgagctggcctgcgagttcagggctcctgtcgctctccaggagcaacctctactccggacgcacaggcattccccgcgcccctccagccctcgccgccctcgccaccgctcccggccgccgcgctccggtacacacaggtaagtcgcccccggcggccgccgaggaccaaagctgcccgggacatccacctggagcgctgaggcttcagtccctctggtggaccccggaacctacactctccccgctcgcctaccccagcccgctcctctcagccgctggaggactcttcagggcaaggctccagagccatcctctccagccttgaggttcacaaaccaactcatcaggacaccccaagatttccttactctctgaagtcctccttaagcctttgtatcagcactccagggaagagtctgtacttcccctgccctccctgcaaccccaaactacagttcctgatcttgctcaccttcgacttcccaaaagcccccaaattgttggtcttgcgccccccacactttaaaaccagcatctctttcctccacctctctctctctctctctctctctctctcatgctctctggaaagtaatcctgttgtccttcatttcagcaaacgcggggtcaaagagggatggtcccggccctgtccccatgcccagccccgtttctgcgcaccgtccctccctgcctagctgatctctgaccctcggctcttgtgcttcctgctacagg

SEQ ID NO: 54 - DNA, 7833 bp, Homo Sapiens
gtctttggtgagatatgtgttttacaagttttaatggagaaaaatgtaagtattttacctcctgaaacttggctatttgagtaatgagaaaatagtcactttccccaggacagtggttctcaatcatggctatgtgtttctccaggaaaactttaaaaatatatatataccaatgcttctgtgtcacttctagggattccaagtctttgaatacgaactctgcatcagtattctttaattatccaggtgattgtgatgtgaaatcatgactgagccccactgctctaagatgaaataaactttcctcagcactgaaatcacaaacttaaactaccaaaattaattaagggcatgggaatcaataaggcatagggaagcttttacattataaaattatttctttaaatcacagctcattgtttatatgttatttgccattgtagaaaagggtgaaaaaatagcaaatttaattactctcagtttgaaaaattatccagaaatgaagatgacgactctgaaacattgtcaatatcatttgacctataaataatgttctaatacatttactacacactgatagatactttttcatatgaatattatacattaaaactaaggcaataatgcatttagaacattctatctatatctatgtatcttaagtaggctagaaattaagatatgagttattaagtatgagatgttaaggtgtggggttagaaattatactgtacttcattatcaataatcaacatatacttcaatatcacatacatttaactttaatttgtacatctttaactatttttaattatgtgtataaatataagtacacacatctttatgtatttatttattcatacctccattcacttatttatataggggatccccccaaatccactaccattaaaccatacatttttattttaatctttagaacaagcccaggaggcaggtattgttattactcacattttacaaatgaggaaattgtctacagtcacaaagttactgtgtcagacatattagaagcttaatacatatttggtgaacatatgcataaaaacagagagacagacatgtacaacagctcatctttacactgagtaaaagcttttaacctgtctcagaaacctctctgtgaaaactgagcaaaaatcgaggtatcctttcatttgtcatataggtataggtggtaccttacttctccaacaaggatgaatattgaaatgtggatcccaaggcccaactccagattttctgaatccctgatagtgggacttggaatttgtctattgtttcaaagtttctcaaggaattcatatgatcaaccaggttcagaaatcactggatcttattgccgaagtttgagaattaaagtttgggccttactgcggctccacagaaagggcaaatgaagtatcatggacagaactgatacgttcccagttagtttcccctctcagaagctaacaggcagcaatacagcagaaattagtgacttatgtcttgtgctctgaagtcaggcagaatttcacagagtcccagcagtgtcactgacgagatttgtttcttggggcaagttgcctgatgctttcaaagccatattccttttatataaaatgagataatattctttgtctcataggggtgttttaaagattaaataaaaataacatgttctatcctacatggcacaatgcctgacacctaagaagcaaaggatacatcttacctttattgaagcaatcagaaagtatgaaatcatgaaggagataagagttctgattggcagtgtatcttattttcccaggttcatttatttatcttaaactattcttgttggagaataactcccaagccccctacttaagctgtgagtaatctcacactttataatgatgttctttccatgagaaaaaaaaatgttcttaagttttctggagaaaatatatctgcactatttctactgaaaaatctaacaactggactctgctcctctgcatcaattctagagtgtatatgccacaaataaagtgttctagctcaagaagattgaaagtaaatatggtatagtattttaaaataagaattttgcaaatacatggtatgattgtgtcatattactagcaatcatatgatacgcaatgcaaagtacagttcatagacttaaatttaattctaataagtaaactgattttgccttgctggggaaaagttaaagcactaatccaattgctaatgcagtcttgtctacttctttggtacctagtgacaagtctaaataatgtatatatttttatttacatattcagtaatacaattctctgctcaatgagtgatgttcttctgccacttggtggtgcttgccagtttcagaatttgtttcttggtggcactataacactaagtacagagtaagtgcaacaaaattgcagcattcccattgaaaaggctttgcttcaaactgtttaataatttaaaggacctctgtggaagcaaccgcatttgttaaccagttacaaccagtaattaactcctttggagttttaacttacttttggcaaaacgtcttaggaagagcatatattattagaaagtatgccaaaaatttacttagcagaaaattcaaaaacagttttcctctgctaagaggttctctaaaattctacttacatagccaaactctgaaatcctagcaggtcctgtttcattatcataattactgcataaacacttttaaggactttgcctttagtttcaagcatgacttattttcataagcctgattagttaccacaccagccttgctatggaaaatgacatgttctcattctctgctgtagagttgttaaatcttgatctatatttatgttgccttctctgctgaaagcctgtagcgaaagaaatttctaattccttgttttgcaatattagttggcagctctatctaatgggtattctgtttccttaaagaatttagctgctctgtctagaagccgattttctgatgcctccaacgtctggtctaattgatctgttttaatggagtcttcgtcggtgaggagcgagatgccaccgactagaatgctgggatctgctgcttaattgccaggagtgagagacactgagattcagaaatctttggaggtgggaggggagagggacagtctcggacggaggcggagatgtaagataaagggatggatttcacacaggaaaaaaaaaaagatttcgttgaggcactgaggtgctgcacgatcacatctctcaaaggagaagttaaaaagcaaggaagtgggaggaggttggaggttaaagtacttaaaaggattactcgggtacaatttgtttttctgctggtgtctgcaaaggatagatagtcccgttttcaaagtatatgaatgcctcttttaagtgattgggaatggacactaattgcctgttaaatgttatcaaatgctctcctaaattcaggggacacagaaagaggggcacaaaaggagaatttaaatagaaaaagggaggatccggaggcttttgaaagcggggggagaagaaggaggagggataacagagaggaatagagaaggagagcggagagaagataaacaaaaacaaaaacaggaatcactgaataatcacacaccaaaaagaaagctcttccctatggggcatccaaaacactgagactgcaatagtgaccccggtcatggaagaaagatgttcctctccacccttgtccccgaaagctcttggtcccgttactggcgactaaaattccattaggctaaagagtgtgtctaactgcctgaagaatgcagcagacggaaggcgggtcccgctatgccgtttgcccttcccgctggagagaatgaaagaaacgcgcagagccagagactcctgccgagttagaccttctctcgtcgccccaggtcaccggccatccggcaaagacccgagtaaggaacgcagggtcactgcctgggccaacaaatggagcccgctctccccttcccggacgccgctgcccggccgatgctcccggcaacccacccgcggcgtatgcagaggagcctttctctttctctcagaccacttgtcccgaccaatctgaccttccaaacacatctgaccgcacctcccaggtggacacactaataggctacgggctggagaggagcgggtgatgaggagagggattcaaacctgcgaacgcttgggctgggtcggagctgcggggggcctgggaggagagaggggagaagagagaaggaaggagagcgcctgccgggatggctgagctgcctcggcgagcagccttggggttgcacgctcttgtgggagatgctgctgttgcttccaggtcggcaagagcggttctaacaccatcgcctctcaccctctttcctgtaaatccctagagaaacgtccctggcctctccgccgcgacattcccagcctgcatccccctacagcctaggcggcgcgctcccgcacgctggagcgccggtcgccagcaggacgccctctcccgcgccgactcgcccctctctgccctgctgctgctgctcctctgacacctccgcccccaccatctccagctcggagagacgccacccagccgcggcccgcactcgcggcccggggtcacgcgcggaagaggggcgctagtccggaccccgccttcggtagggggcgtcctggagcggagagtgaggcgaatggtatatgagtgtgcgggtagcccaccctgaagcccgagcttctcatttgagccatgccccgcctagccccactcgggccagcgcctggcgagcgagcccatctgtggcttccgcggccgcctcctccttgcatccttgcacctactcgtcgacccctccctcccgggacctgcatcctgctccaccaatcagagcccgactgcctcttcccacgtgaccccgggcgggctgaggacctgctgcttcccaaacgccagagggatgcgggcggcagagctcgagaggcggctgccgggctgcggggcgccttgactctccctccaccctgcctcctcgggctccactcgtctgcccctggactcccgtctcctcctgtcctccggcttcccagagctccctccttatggcagcagcttcccgcgtctccggcgcagcttctcagcggacgaccctctcgctccggggctgagcccagtccctggatgttgctgaaactctcgagatcatgcgcgggtttggctgctgcttccccgccgggtgccactgccaccgccgccgcctctgctgccgccgtccgcgggatgctcagtagcccgctgcccggcccccgcgatcctgtgttcctcggaagccgtttgctgctgcagagttgcacgaactagtcatggtgctgtgggagtccccgcggcagtgcagcagctggacactttgcgagggcttttgctggctgctgctgctgcccgtcatgctactcatcgtagcccgcccggtgaagctcgctgctttccctacctccttaagtgactgccaaacgcccaccggctggaattgctctggtaagtccagaacccccgtccccgaccctttaactccgcagaagaacacgcgtatccagcacagaccagcctaccctagcgcgcctcctcagcccctcacctcctactgccctagacccctaataccacccacctctatccagagaaacaaggggaactgttgcaggcccgggggtgaggggtggttctgggatgggcagaaagtgcaggtgtagcaggaaacctttgcatgcttgcgcttacattggagctgcgaggattttgagaaatattaaacgggatggttttctgggttcactgttttgaaagagcaccaatcctaggggaaacactgaaacagaagctttgtcatcattaaagaaaaaagtcttactaggatgaggaagaaataactttatgagaaagaatgagcgagaaagcaataaatcaaatggtgactgcaggggaatcgctgattcctggcaaaggtgccatgaggtcgcactggtctcccgttgaagaccaggtcacacagattctagaggagctgggtttcaatagaatttctctctctctctctctctctctctctctctctctctctctctctctatctatctatctctctctctctctcattcccttctctcctaggcggcaaaagacattggttttgcagtccagatatgcccctctctttgcttccctaagcttcaaggtagtacaggggagttgagaaaaagaacactttgcgggtctcccaggccggagtgggcatgactgaggctggtcaggctccatgtaggcgagccgagggcggaaccgacttcagtgggcgctgactcctccatttctggacaggcttctgtggagtgggtcaggcactcttcttgctcgctcgggttccttcagattctgacggcgaacgcttggcaggcttcgctctgctgaagcttcctaattaaatagggccagaggatgggagttgctgcactcctagctggcatagcattcggtttgacagcctgtagtatagggtgtatgtaatttttcatcttctgtgaatataattttgctgtagttaaatctggctctgaataaagtgtctttcaaagatgtatataagctgaagtgtatgtaactttagagaggagggaatgaccaactgtaactcagggtgaaagcctgtatagttcctagttattactgatgtaaatgccaaaaggaaaattattatgcatcattctaatttatcctttacaaagacaagttgagatatgcaaccctattagatttgggtcaatagattgttctcttttttggcagtttctaaatttggcattttaataaaactcaacatgtttctataacttcttgattcatgcgtacatgtgtgttgtttttgaaagaataagtttcactttgctattgcctaatcactttttagatgctttattatggtaataattatgagcctgcaaaaacaatttttggaaatgttgatggctttgtagtccaacacagactggtttgcttcattcctagcccttgcattgttttaggaaataactaacttaaatgtgaagttgacatttgcaatcaagaaattacatatttaccagatattttaaaggggactgcataaactaaagagaataaactggttttgcagataggttgtcaagaacttggcaccccgcttccacccctgttaacttagaggtgatcaatcttcatttgagccaaacagaccatcacagaaaacactgtgcctgtttatctttattattgaggctttgtttcctctttgtctggatacatttcaaataaggggttgtttcagtcgttgaagcaaaagaacaattaaagatggggaaatggtaaaagggtattcagagatcatcactagctcttttccaaaatgtggagttttgtggtcataaatattgtccacctaatgagcaaaaaataaaaataaaaaaaaaacaggaagcaaatgttaagctttcattcaccactgtcagtattaacgcaagctttaaaaaatagcactatcagaaaaggatactaaaggagaattgactagaaaagaattgtggaaaatggaaacgaatattgatcacttaactagattttgaggttatcagtagacagtgaccttgcagtacagctatagttgttggatttaaaatttaggacaagtattttaaagcttcaaagtagtgcttttttttgttaaaaatctgtaagatgttttaatgactggagtgttctctttgaatttgagg

SEQ ID NO: 55 - DNA, 2501 bp, Homo Sapiens
gcaaatttttatattttgaggagagacagggtttcaccatgttggccaggctggtctcaaactcttgacctcaggtgatccacccgccttggcctctcaaagtgctgggattacaggcgtgagccaccaagcctgacgggtagtaatttattttttatataatttttttcttctttttttggtagagacgaggttttgccatgttgctcaggctggtctaaaactaccgggctcaagtgatctgcctacccgggcctcccaaagtgcagggatcacaagcatgaaccaccatgcctggctgtaatttttcatatattccggatattaaccctttaccagataatacagtttgcaaactttttttttccccattctgtaggttgccttttcactgttggtcatttcttttgctgtatagctatccttaagtttgttgcaaacccatttgtctatcttttgtcttgttgcctgtgttttgctgtcatatccaagaaatcattgccaaatccattgtcatgaagcttttccccatgttttcttctaggagcactatagtttcaggtcttatgtttaatctttaataagttttgtgtttttgtatatggtgtaaggtaagggtccaacttcattcttttgtatgtggttatacagttttctcagcaccatttgttaaagacacaatctttcccccatgttctggtgctttaaaaaaaaaaaaaattctggctggttacggtggcttaggcctataatcccagcactttgggaggctgaggcaagtggactgcttgaggctaggagtcccagactagcctggccaacatggtgaaaccctgtctctaccaccgaagatacaaaaattagccaggcgtggtggagtacgcctgtaatcccagcctactagggaggctgaggcatgagaatcgcttgaacctgggaggcagaggttgcagtgagccaagatctcaccactgcacgccagccggggtgacagagtgaggcagggtcttaccctgtcgcccaggcaggagtccagtggcccaatcatggctcattgcagcctacactgccagggttcaagccatcctcccacctcagcctcccaagtagctaggattacaggtgtgtgtcaccatgcccagcaaatctttgtattttttgtagagatggggtatccctatgttgctcaggctggtcttgaactcctaacctcaagcgatcctcccacctgggcctctcaaagcactgggattacaggcgtgagccactgcgcctgacatggtgcttcttaatttattcttactttttatttttatttttttgagacaaggtcttgctctgtctcccaggctggaatgtagtggtacaatcatggctcactgcaacctctgcctctccggttcaagtgatcttcctgcctcaacctctggagtagtttggactatgggcacatgccacaacgactagctaatttttgtttttctttttttctttctttctttctttctttttttttttttttgagatgcagtttctctatgttacctaggctggtctaaaactcctgggctcaagcgatcctcccaccctggcctcccaaagtgctgggatgacaggcgtgagccacgtggtgcttaaaaaaggcaacaaaaaaccccccacacactgggtatagaagtggcatgggcctctatacactgtgagattcttggtactagctacaaattctgtgtatactcaagattttctagagtaggtgcaattaccccgttttacagatgaggacacagaggctgagccgtagtgacccacctaaggtcgtatagccagcaaatagatggaggttggattggaactgaggactttactcaagggctctcacaaacccttgggggcttctcgctgctttatccccatcacacctgaaagaatgaatgaatgaatgcctcgggcaccgtgcccacctcccagcaaaccgtggagcttggacgagcccactgctccgcgtggggggggtgtgtgcccgccttgcgcatgcgtgttccctgggcatggccggctccgttccatccttctgcacagggtatcgcctctctccgtttggtacatcccctcctcccccacgcccggactggggtggtagacgccgcctccgctcatcgcccctccccatcggtttccgcgcgaaaagccggggcgcctgcgctgccgccgccgcgtctgctgaagcctccgagatgccggcgcgtaccgccccagcccgggtgcccacactggccgtcccggccatctcgctgcccgacgatgtccgcaggcggtaggtaccatgggggggaacacggactcagggggacaggcagggcgctgggtggggggtcgcttcccctcggggtggccggtggccgctgctgacagacgggcgcgcatgcgtggggtggtgcggcgcgcagcggcagttggcgcgggcagggtggcacttccggtcgcgcgtgcccgggctg

SEQ ID NO: 56 - DNA, 4138 bp, Homo Sapiens
gaattccggatccggatctatgtccccgcccaaatctcatgtcaaattgtaaaccccaatgttggaggtggggccttgtgagaagtgattggataatgcgggtggattttctgctttgatgctgtttctgtgatagagatctcacatgatctggttgtttaaaagtgtgtagcacctctcccctctctctctctctctcttgctcatgctctgccatgtaagacgttcctcgtttccccttcaccgtccagaatgattgtaagttttctgaggcctccccaggagcagaagccactatgcttcctgtacaactgcagaatgatgagcgaattaaacctcttttctttataaattacccagtctcaggtatttctttatagcaatgcgaggacagactaatacaatcttctactcccagatccccgcacacgcttagccccagacatcactgcccctgggagcatgcacagcgcagcctcctgccgacaaaagcaaagtcacaaaggtgacaaaaatctgcatttggggacatctgattgtgaaagaggatggacagtacacttgtagccacagagactggggctcaccgagctgaaacctggtagcactttggcataacatgtgcatgacccgtgttcaatgtctagagatcagtgttgagtaaaacagcctggtctggggccgctgctgtccccacttccctcctgtccaccagagggcggcagagttcctccctcccaccctggagcctccccaggggctgctgacctcctcagccgggcccacagcctagcagggtccaccctcacccgggtcacctcggcccacgtcctcctcgccctccgagctcctcacacggactctgtcagctcctccctgcagcctatcggccgcccacctgaggcttgtcggccgcccacttgaggcctgtcggctgccctctgcaggcagctcctgtcccctacaccccctccttccccgggctcagctgaaagggcgtctcccagggcagctccctgtgatctccagtacagctcagtctctcacaggctccgacgccccctatgctgtcacctcacagccctgtcattaccattaactcctcagtcccatgaagttcactgagcgcctgtctcccggttacaggaaaactctgtgacagggaccacgtctgtaatgctctctgtggaatcccaaggcccagcccagtgcctgacacggaacagatgctccataaatactggttaaatgtgtgggagatctctaaaaacagcatatcacctccgtgtggcccccagcagtcagagtctgttccatgtggacacaggggcactggcaccagcatgggaggaggccagcaagtgcccgcggctgccccaggaatgaggcctcaacccccagagcttcagaagggaggacagaggcctgcagggaatagatcctccggcctgaccctgcagcctaatccagagttcagggtcagctcacaccacgtcgaccctggtcagcatccctagggcagttccagacaaggccggaggtctccttctttgccctccagggggtgacattgcacacagacatcactcaggaaacggattcccctggacaggaacctggctttgctaaggaagtggaggtggagcctggtttccatcccttgctccaacagacccttctgatctctcccacatacctgctctgttcctttctgggtcctatgaggaccctgttctgccaggggtccctgtgcaactccagactccctcctggtaccaccatggggaaggtggggtgatcacaggacagtcagcctcgcagagacagagaccacccaggacagtcagggagaacatggacaggccctgagccgcagcttcagccaacagacacggagagggagggtccccctggagccttccccaaggacagcagagcccagagtcacccacctccctccaccacagtcctctctttccaggacacacaagacacctccccctctacatgcaggatctggggactcctgagacctctgggcctgggtctccatccctgggtcagtggcggggttggtggtactggagacagagggctggtccctccccagccaccacccagtgagcctttttctagcccccagagccacctctgtcaccttcctgttgggcatcatcccaccttcccagagccctggagagcatggggagacccgggaccctgctgggtttctctgtcacaaaggaaaataatccccctggtgtgacagacccaaggacagaacacagcagaggtcagcactggggaagacaggttgtcctcccaggggatgggggtggatccaccttgccgaaaagatttgtctgaggaactgaaaatagaagggaaaaaagaggagggacaaaagaggcagaaatgagaggggaggggacagaggacacctgaataaagaccacaccctgacccacgtgatgctgagaagtactcctgccctaggaagagactcagggcagagggaggaaggacagcagaccagacagtcacagcagccttgacaaaacgttcctggaactcaagctcttctccacagaggaggacagagcagacagcagagaccatggagtctccctcggcccctccccacagatggtgcatcccctggcagaggctcctgctcacaggtgaagggaggacaacctgggagagggtgggaggagggagcacagagactggctggggtctcctgggtaggacagggctgtgagacggacagaggctcctgttggagcctgaatagggaagaggacatcagagagggacaggagtcacaccagaaaaatcaaattgaactggaattggaaaggggcaggaaaacctcaagagttctattttcctagttaattgtcactggccactacgtttttaaaaatcataataactgcatcacatgacactttaaataaaaacataataactgcatcagatgacactttaaataaaaacataaccagggcatgaaacactgtcctcatccgcctaccgcggacattggaaaataagccccaggctgtggagggccctgggaaccctcatgaactcatccacaggaatctgcagcctgtcccaggcactggggtgcaaccaagatcacacaaatccctgccctcatgaagctcatgctctcatggggaggaagacagacatacaaagagatctagaatgtgaggtcaggtgttgacaagagccctggaggaatagagcagggaaaggtcagaaaaggaagacccagggtctctagaggaggtgtcagggaagggatctcccaagaatgccctgatgtgagcaggacctgaaggcaatggggagggagccgtgaagacccctggaaaagcagattccacacagggaaatgccaaggtcggaggtgctaaggaaataggagacacactgctgaccttgacctagtaggacacacacacacacacacacacactcactcactccagggctgggggatgaagagacctgctcaggacccaggaccccatttttccaccctaatgcataggtcccaatattgaccgatgctctctgctctctcctagcctcacttctaaccttctggaacccgcccaccactgccaagctcactattgaatccacgccgttcaatgtcgcagaggggaaggaggtgcttctacttgtccacaatctgccccagcatctttttggctacagctggtacaaaggtgaaagagtggatggcaaccgtcaaattataggatatgtaataggaactcaacaagctaccccagggcccgcatacagtggtcgagagataatataccccaatgcatccctgctgatccagaacatcatccagaatgacacaggattctacaccctacacgtcataaagtcagatcttgtgaatgaagaagcaactggccagttccgggtataccgtgagtgattcccccatgacctctgggtgttgggggtcagttctacttcccacacacaggattatcaggcctgggctgtgctgtggccccctctgcattacgcaccatgttagggtttgggcatttagtgcaggatacacacagaagagacaaacttcaacagatcagaattc

SEQ ID NO: 57 - DNA, 11222 bp, Homo Sapiens
ggcctggcgctggtccaggagggtagactctgccagggaggcacaagctaagctgggggtggggtgggagggcctgctggcaggagggaggcactgcccagactggcctccaaaggctggttcccagaaggaggaggaagagagtagtgaagatcgtggggagtcctggctttgaggagccagagttctccttcttgccacatctttgatctcccttggtggtgtcttaagcccagatttaccaaagggaattgtcagctgtccaagggctagcaaattcctaggtcacctagattggattttctgaccataaaaactgtgggccaggtgcacagctgcctgaggggctcaaacctgtgcaggtgggtgctggaatcccctttgctatagcgttctctttgtgtgcatgtgaccagaggtgagagtggctggagaccgaagatggcagagcccgtctttctccaccagactgaggcccccgacttgccttgcctggggagggtgctcagtggaagtcctgggatgttcagtctggacaagaaaagtcttgggtgagcctgctccttctcttgtgaggcagactcagctgggcctctatatccccaaggagcaggcggagctgccgcaaggaagtgcacgtgacatggaggcatcttttggttcgacataaaaaaggatttttaaagctttaggtagtgagctcaccactcccaggagtattcaagcagatgccagatgatgatctgtagggaaaactatgtttagtgggaaattggacaaaataccgttgaaggcctcttttagtcacaagatactatggccctataattctagatttctctgcttctagctctctataagtctggaatctagaacccaagtttctccggtgctgaaaagttgaagactttgacactctagaattttaattctgggatctcaagattccagaattgggagccttgaggatgattctacaagtctcagttttggattcaaaggatcctgtgatatgaaagggaaaaagaggaggtctgacttggtgggatccagttttgccccactgggtatcagactaatgtgccctgcattcgtgcgtgtgtgtgcgtgtgtgtagcatgagcgtgtaaggctgtagaaagttttgcacacaaaggcagcctggctttcctatcatgtgtctgcagcttctctgccctggccataatgaaggctgtcacagggataataatagcccccaaacagagctggtgactccaggtagccatagcaactgtgaggtaacgctgctctgttgtagagatgtgtgagtacaaacagatgtcggtgccttcccattagcttaaatggtaaaacttaaaaggtccatcaacttcaaagctacaggtttccatgagcatgccagttaatgggggcgcttgccaagcgggtgatagcttcatattaaacatttcagcatcagtaatgggttgatgagattttaaatgctcaggccatccccagacaactcaggaggccagagacgggagaagagctgggattcgggtagtaatcagccctgccctgccccgcaccctcaggggtgttctgacactctcgggagggcacaggccagagagcatttgaaaaccgcacattgcgtctcaatctccaggagtctcagatctgcctcttggccttccccagcgcaccaggcagggggccccaggtcagatgtggcacagctcaatgccatctccttctttctgccctcctctctcacaccctggactcacctccagcgagtgaccagcagtaagggtcaaactgctgagagtctgagaccggggcagaccctctcagagttgtctttccttctgaggctgggcctggcacagactggggcctcagtaatgggctttcaaatgaatgaatgaacaaaggaacaaacagatgactgactgactgaatgaatgaatgagatcccctttggcatccccatggcttctttttttctttttgagatggaggctcgctctgttgccaggctggagtacagcgatctcggctcactgcaacctctgcctcccgggttcaagtgattctcctgcctcagcctcccaagtagctgggactacaggttcgtgccaccatgcccagctaatttttgtatttttagtagagacagggcttgaacatgttagccaggatagtctcgatctcttgaccttgtgatccacccacctcagcctcccaaattgctgggattacaggcgtgagccaccacgcccggccccccatggcattttagctacttattttgttactgcttcttccactgctaaagagatgggcctttggaggtcggctggcctagcatttggggttgacttctggaatggtcactagggaaggggcgccagaggtgcagccggtgcctctgacccttttggtcgctaggagtcagccgactcagtacacaggactcactgaatggagacacaaggctcctccagggagtggcggctcatggcaatcctagaatggtcaccagccaggctttagagacccacacagagggcgttctgacccaaagttgcactggggaactccaagtttggggattctttgaatttaactctttttctagctacatttcctattatttgtccaattcttaccaaacatctctgttcacattctgaagctgggatctgactggcagagctagtagatgctgactattcagatggagccctgacattggctttctcagcttggctgtgactggcagcaggtttgcgggagaactgtgtgtcccagaacatgactggctacacctgcacctcagcaagattggggcagggcagttatcttcaaaaagctgtgtaggtggggcagtcattactgacaaatccagtgcagacccaggatggcccaaacactggcttatcctttctgaatctcatctcccacagctgtaaagcggggtggtgctcgctacctcacagaggtgttgtaaagattagatgtaatcttgccaagcagccactttgtaaactgtatagtcttatgcagatggaaggaagggcctgtgcctaccttgatcatagcactaaacaaactgtactgtattttcattcctcttagttatctccctaaaaagactctgagttccttgaacacaggaaggtgttttatttgattttgttatcctcagcatgtagcagtgtctgacacacagtaggtgctctatcactgtgagagggatggatggatgggtggagttacagatggatagaaggatagatggagggatgggtggatgatggatggatagatggatggaggggggatgatgaatggagggataatgagtggatgaatgagggaatgggtggatggatggatggagggatggaggaacagatagatagatggagggatgggtgggtgatggatggatagatggatggagggagggatgatgaatggagggataatgaatggatgaatgaggggatgggtggatggatgaatggagggatgatgggtggatgaatgaattgagggatggatggatgaacacatggatggatggatagatggatagatggaggaactggtggattttggatggatgggtggatggatagatgaatgaatgcctggatagacaaagagatgatggatagatgaatagatgaattaagggatgtcggatagatggagggattgatagatgttggatggatgggtggtggatggatagatgagtgaatgcatggatagacaaagagatgatggatggatgaattaagggatgacagatggatggatggatgagtaactggatggacaagtggataaatggatagatggttgaatacctgaatggattgaaggaggatgcatggatgtaagataaggctaatcatcctccactctctttctttgcaaaaccatccacccatttactcaataaacatttattcagttcaaacttggcacaaagcaccatgtgaggcccaagagatacgtgggttaataaaacagagctcctgccctcctgaaaactgcaaagaaaggggcgtggcttcctgagttcaaatcccaactctgccagcgactagttgtacatcagtgatgtttccctactttctctcaattaaatagggataatgtcagtacctatcacattgggaggtcttgcggggattaaatgagttaccaaatgccaagtgtttgggacagggcctggcacccagcaaagtctcttgtgagtgctggctgctattatcctaatggagaagatggcatgaaaaccaggaaataggatgccctttgggaagcaatgcaacaggaacttacacaaagaaaggaaaggaggaagcaattagtggtgtctcaaaggagtatgtcaagaaaaacttttcagagggaaacctttgagcagggtcatgaaaacaggagttctctaagagattgtggacttgcctgggaccacctggctataagcacaaaaccatccggttcctttctgtcacttctggctgggtgaggggtctctggcaaaggggcagaaggtgcgtgagaggttgcgaatggccaggactgtcctggggccagccggggcacctggtggccaagcttagaaacatgacaggtcctcttgggagggctgaccgcagggagcgttgggtttcaggctgctggcgtcggcttctgtggtgccctttctgtcggctatgagagtccagacagtgcccaacctcctccccttctttccacacgcacaaccaccccaccccctgtggcctgagctgtcctgcctcgccacaatggcacctgccctaaaatagcttcccatgtgagggctagagaaaggaaaagattagaccctccctggatgagagagagaaagtgaaggagggcaggggagggggacagcgagccattgagcgatctttgtcaagcatcccagaaggtataaaaacgcccttgggaccaggcagcctcaaaccccagctgttggggccaggacacccagtgagcccatacttgctctttttgtcttcttcagactgcgccatggggctcagcgacggggaatggcagttggtgctgaacgtctgggggaaggtggaggctgacatcccaggccatgggcaggaagtcctcatcaggtaaaaggaagagattccattgcccctgccacccacaccctaagatcaagggtgttcagctgcaaggtggaaagtttgcacgtggggtaggtcagttggctgcattagttaagggtgttagaacggtcacttgctttttctttgcttttaagtgtcagggattggactcaggagagggaaaggagccatttcaggctgatgtcagcagctggaggaagcatgagaatcaaacctaggatgctcagagtccaccaggaagaattttagaattatagacagtcagagttaacaagggtcctgagagattttgtacagccacctctcttacaggatgaggacaaaaagggactgagaaggggaggacatttccagagtcacagctcattaaatgctcttaaagtgtcaaggttaagacatgctcttcaaggggagacagatctggttctagacttggctctgccactgagccactgggtgacctttgggaaagtactcaacctctcggagcctcaatttcctctcctgtacagtgaggggatatcctaatatctatatcctagaggagatgtgagaattaaataaaataatgcatgcaagaggcctggcatggttcctggcatatactgagtcctagaaatgttagtagctattactgatgaagcccaggctagggacctttcaaagcattgcaattagagaacagaagatagaggctcattagtgaccttcgatgttgagtatgtctctagtttgagaggtctgaatgatgtggtctgcaagtatatcctgccttctaccacaagggattccagaatacaccaaagaaaacaaaattctgaggtttgtaaatagagggtggctgtggtttgtacatagaagctcatctcctcgttgccttctatcccaaaggtgatacactcttctcttggccccttccctcaccattctgagctggttccctcagaagtctaataggttaagaatcaacgtttctgccaacgggaggaaggaagtgggcgccggggttgccacaagtgaatggattgtctttggcactttaatttgcagattaatttctccttatttgtgagccagagccaattttcctcttccactccgtcgtcctttgggtctcccttgggctttacccatttccagcttccgtctacctcgggagcatggctggtcctggaagctccgttatctaaaatttgagccgttggtgatccgtgctagaaacacttgaggaagaagagttgagttttctgttgactgtaatggcatcgtagtgtgtttatgtctttcttctcctgtccctgtcatctggctgcaacaggccctgttggattgcacaaagtgctcccccgaccaacacacacacacaaattgacatcaactcctgggccacagatatgccatgtgaccttggacaagtctctccacctctgggccttatttctctgctggttgagcgaagggattgtcttccatggtctccgagatcccgtcccacgctcatgccctagaattctctgagtccttgatgcacttttgcctttggcgaggaggcaggacagtcaggcgtggaggtaggagaccagagtttgcagagcagaggtctttccaaggtgatttgggagctgccagacctaaggcagtgacttgtacgtcttgaaagagactcagggtgttgcatcatcagggaggatcacggaggtttgccgggggccgggagccagggataagacataatgcctagggttgctggtccctgaaaggtcccagaggcctggtgccctgtcacgtcttaggttgtgggacatgcagagactgtgccagctggttctgccctctcagtatttggggtacagggaggatggcctccctgggggcagggtggaggaggctcatgcccaggactgcaaatgccacccgtgagagttggcatcttgactttgttctagatactgactctggattttctaactgaccttgaaaggttatgtctccaatcttctgattgtaaaagagggcaaattccatgaagcccagtctgtaaaacactgaggccttcactgcacgtacacaaacataaaattctagaacacagaagctggaaggtcacttggagattctggctccaggagtggggcttcggaagggagggggctgctgagtgggctccacacccctgtttttcctttctttactcaaaccttttttgttttatttactttggctgttttggggagcggggggaacaaaggatttcaaggtcataaaatgtttgaaaatcaccagtggtggtcactacttctcattacagggaggaactgggcctgagagtctccaccggttaatggcagccacaggcaggaccaaaaattcctgggtgatggtgatgataatgataatgataatgataatggtagagatgatgaggaggagaaagacagcaaccatttattcagcacatactgattgctgggctctgtttaagtgtttcactcactgaagcctgacaacaatcttatgaggtagatatgattatgatcaccacatttaacagagaggttaagtaacttacgccaagtcacacagcaagtaagaaaggagctggaattcaaattcaggcagcttggatccagaatccttgctccttttttttttttttgagatggagtcttgctgggattacaggtgcatgccaccatgcctggctaatttttgtatttttagtagagactaggtttcgccatgttggccaggctggtctcgaactcctgacctcaggtgatctgcccgccttggcctcccaaagtgctgggattacaagccaatgagcccggcccagaatccttgctcttgaccactatgctatactgccccatgaccttgccacacgcaagacgggctgccacccacgctctggttcttttattctagtagagccagaggggtgttcatggatctgacaatgtgctccatgttccatgtgagtgtccaattgggcctcagttcagagaacagcaggaaaatggcctcccttctctctgacttggactgaagatctgtctgatgaaccaggcccactgacagcagggttgaagctggaaacacaggccagcggggctttctgaaatactagagcaaacgccctccgtccatttccacaggctgaggggctttcatctgttcattttccggatcaggcaaatccaggagaatggccttctgtggctgcctggggggctcctagctgcaaggcctgggcccacaggaggcaggcagctgtgtggtgccggaatgatcttgcggggagacaaattagcccgattctgctctgctgtttaaagtaaatatggggtggggtggggtggctcaggcctataatcccagcactttgggaggcaggatcggggaatcgcttgagtccaggagttcgagaccagcctgagccacatagtgagaccccccttctctacaaaaaataaacaaaattagctgggcgtggtggtgtgtgcctgtagtcccagctacgcgggaggctgaggtaggaggatcacttgggcccaggagattgaggctccagtgagccaagatcacaccactgcactccagcctgggcaacagagcaataccgtgtctcaaaaaaatattaataaagtaaatatgagctctctccctggctgtctggtgttgagtggaaagaaaggcattggcgggtctagacccttttggtttacatatggatgagcaatgatccagagaggctaagtgacttcaacatcacagagcacattggcgccagaactgggaccggaactcagcttccgtaactgtcagtcccatgttctcttccctagatatcagagggcaggggcaggccccaaaatgtctgagacccccagctgccttgtggcccaaattcttggccctgctctgcctcagacagtctgctttcagcgtcctgacctctgaccatcgcctgtgcatgccaggtcttgcatctgtcaggcgggagttcaaggatcattgtcgccagataataatagtcaggagctcagggacccttggatgaaaggtgtcagagacaagccgtcagtgacgcacgaggatttggataaggtcctggagcgaggtggcaatgttgggcacggcggcagaccatgcccaacatgggggaagggagtgtatgtggttcaggcttgtgcgtgtctctgtgtgtgtgtgcaggtgagtatggcgtgtgctgggatatatttatgtgtacctctgtgtgagtgtgcaggcccatatgtgagtgtgcacacacatctgtgagagcctgcatgcatgtacacgtgtgaggtgttgatacatgtccatgtaggtatcagtttgcctgtaaatatctctgtgtaacaataacaaagtccgaatagtcatcaagagtatagacatgaagccagactgcctgggttaaatccccagctagttagtctttcggtgcctctgtttcttcctctgcaaaatggcgtctaccccatcaggattttaaaatcagttaatatggctgggcgcctgtaatcccagcactttgggaggctgaggcaggcggatcacaaggtcaggagatcgagaccatcctgcctaacatggagaattctgagaattgctcaaacccaggaggtggaggttgcggtgagcagagattgcaccactgcactccagcctgggcaacagagccagattccatctcaaaaaagaaaaacaaaaaacaaaaaaaccatgaactcattttcaggttgaggagctcagcatcctggttgtgaaataccctcctcataaaaccctgggatggagactacggggatcaggtgcttccttgtgacaacttctgggcatggtggctcagggcgcaaactggagtgtggccacaatacatactgtgtacttttacaaggatgtcacagagcctgggtatcataaaagaggagcttttcaaggaactgaaaccattagacaggagagagagccctgggcagacagggttgcccgtgccaaacatttcagctgtggcacaagggaaagggtgggagttatgaaactgttccattttgggtttaggtctgggctctgccgctagctagccaagtgaccttggccacttatctctgtggtcttccatgagtaaaaggcggaaactcactcctacccagagggcaggtctgactccctttaaccagcacccacctgctcacagcaggaaggactgaggtctaaagctggaggtgggcaggaaggactgaggtctaaagctggaggtgggcaggaaggaccaaggtctaaagttggaggtgggcaggaaggaccgaggtctaaagctggaggtggctgctcagagtcccagcagaggcctctggggcacctcactgagtgcctggcaggagtgggtgcctgtctcagggctgggttgagttgctcccaccaggacccttcgtcatctgcacagtgaggggactgggaggttcagagagtcacagcttgggctcaaaacaagcaagaggtttctgagtgtgaggattgctctggagtggaatggccctcacaggtaggagtgagcctcctgtagctagaggtatttaagcagctgaaggacaatccctgggcaggaagctgcagagatggtcgcagcgtggactagaactgctgttttggtcactcagacctcattccagcctggcttctctggacagcacccctgcaatagtgagctggtgactttacgcctcagaacctcggtttccacatctgtaaaatgggaattatatgacactcactatgtgccagacaccctgttggtacatagcacacactatctcacttaatccttcaagtagggacaagttatccccatcccttatatgaggaagctgaggcacagagaggtgaagtgaatggcccaaggtcacacagctgggaagacagggagctaaacttgaactctagtctggctgcccccagacctcacaccgcacctcccatgccgactccagccttccctgtgcccacagg

SEQ ID NO: 58 - DNA, 5952 bp, Homo Sapiens
atattcctgatttctatatgagtatatgcccgagtagcttggactacaggtgtgcagcaccacacccagctaacttttaaatttttgtgtagcgatgaagtctcactttattgcttaggctggtcttaaactcctgggctcgagcaatcctcccacataggcctcctaaagttctgggattacaggcatgagccacagcactcgagcaagatgatcttctaagacaggtgaagatgttagtgtctagaacttcaccttcaggggcacgtaggtatgaaaggtcatatctaagtgagtgtcatgtcagtccttctagaaactcagctgctccttttcaaatccagcctaataaaaggaggcttggagaatcaatgcacataagtcagaattatagaatgcacagtatgattactaggatggataacatgtggtctgaacaaacttctcatccattacactcagccctctcaggttaatggaactcagatcaagtatattcctgaagtcagtactgtgtgacgaacaggggtctggtggaagtgatgctaatagggctttaggccagctttagagcccttctctctctctcttttcgttttttgttttctttttgtttgttttttgttttttttttttagacagtttccctcttgttgctcaggctggagtgcaatggtgtgatctcggctcactgcaacctccgcctcccaggttcaagcaattctcctgtctcagcctcccgagtagctgggactacaggcgcccgccaccacagctggctaatttttgtatttttagtagagacaggggttttaggtcaggctggttttgaattcttgacctcaggtgatccgcccacctgggcctcccaaagtgctgggattacaggcatcagccactgcacctggctcaagaaacattcttaagcatgcttgatcttggtaaatgcccctgatttcttctgtaggaaaaaaccctagagatcgaatttctgtgtcaaagaataagtaaaattctaaggcttttgatacacatttctaagtttccaccagaaaaattataccaatgtatactcccacttgcaatgtatttaagtgcctacttccttgaatccttcctaacacaccaggtgttaacatgatttttattaatttggtaggttaaaattctgtctccattgaatttacatttctttgcttattaatgtggctaacaaacttcacgtttatgaagactaggactggacagtggaggccagatacctctggctttttgtttagatgaataaattttctatttctcttaatccattcaagttgagttctctgtcactgaaacctaaactatactaaccaatataatcctttgaggcatactgaagtcttaaaacttgtatggttattcattatgttttatgggtttttttcttatgtttggaagcccataggaagatctcataaatatttaccaaaatatttttccatttcttattgggtcaagatttgaatttgaattctttatctagaatttagtgaataattattaggaaaagtctttttttttttttttgagatggaggtttgctctgtcacccaggctggagtacagtggcgcaatcttggttcactgcaacctctgcctcccgggttcaagcaattctcctgcgtcagcctccctagtatctggaattacaggtgtgcaccaccacgcccagctaatttttgtatttttagtagagacggggtttcaccatgttggcctggctggtctcgaactcctgacctcagatgatccacctacctcagcctcccaaagttctgggattacaggcatgagccactgcgcccatccagaaaagtctacagcttttattcttttctaatagtttaaccaattatctgatcaaaatttacttcattctttctcccactgatccaatagtacctttactagatgttagagtagccacttaaaatgtaaattggatcacatcaaagatctgctgttgaccacattcccttgcacttttagagagcctacaaagtcctgcaagagctcaccccagcctctctgcaacctcaccttgcaccactcttgcttcagacacatcagtctgagttctacatcaaacttgtctgaatatattccaagtatgctgacctttataatcatgctattctctcagcctagaatgcttttttccaactctccaagcagctgtcttctctgataagatgctacctcctcagagaggccttctctgaccacagtcataggcatgtttatgtcctcatttcagtttaacataaaatttacgtaactgtacacctctttatcatttgacacttttaggaggacatcacttctgtaatagagcagaaataaacagattgatgtacatggtggatcccccatggatagagtttgtcatttaaaatgtcttcaaatctattacatgtaatttggcattaaaccaaaatgttattatgtaagcgaatgtttttaaagtctaaaagttcttttaaaacaaaatagacccgggcgcggtggctcatgcctgtaatcccagcactttgggaggccaaggcaggcagatcacatgaggtcaggagttcaagaccaacctggccaacatggcaaaaccccgtctctactaaaaatacaaaaattagccaggtgtgatggcgcatgcctgtaatcctagctattcaggaggctgaggcatgagaattgcttgaacccaggaggcggagattgcggttagccaagatcacaccactgcactccagcctgggtgatagagtgagactctgtctcagaaaaaaaaaaaagaaaaagaaaaagaaaaaaaaaaagaaattctaagtgataaagcattgtgtaacagtttgaggctgggcacagtggctcatgcctgtaatctcacactttgggagaccgattgggaagattgcttgagcccaggagttggagaccagccagagcgacatagtgggaccttctctctacaaaaacatttaaaaattagccaggtacagtggtgcacccctgtagtcccagctatttgggaggtggcaagaggatctctcgagcctagaagttggaggtggcagtgagtagtcatcttgccactgcactccagcctgggtgtcaaagggagactcccctctctagaaaataataaaaaaaaaagtttgacagttttcttgcttgtgctacataaaataatggtacatattacaattgaaggcatcttataatagaaatgccctttcctgttcccttttaaggctgacccagtgctttaagaggctgatacagaagggtaaagttaagtctccacaaaatccagggaagagactgtgaaactcatcttagaaccttgtatggagtcacagctgaactaggaaaaaaaaaaaaaaaaaaaaaaggaaagaaaggcattccagagataaagaatagactaaggagaggagatatttgaagccataatgattgagaatatgtcagacttgaaatgaatcttcagttccctcaacaagacaaataaaactaactccatacctagatacatggtagaaaaactaaagaattctgctgaccaaggtattaaaagtaactaaagagaagtggtgtgaagaaagcaagagagaaacaacaaatcctgtccatcctgtaacaattgaaaatttctggctgggcgtggtggctcacgcctgtaatcccagcactttgagaggccgaggcaggtggatcacctcaggtcaggtgttcaagaccagcctggccaacatggtgaaaccccgtctctactaaaaaaaaataataataataatacaaaaattagccgggggtggtggtaggcacctgtaatcccagatactcgggaggctgaggcaggagactcacttgaacctgggaggcggaggttgcaatgagctgagatcgcgccactgtactccagcctggatgacagagcaggactccatctcaaaaagaaaggaaaagaaaagaaaaaatattaaatgtgtacgctctttgactcagctgtattacttcaaggagttgatatcaccaaaattgcctaagtgctcaaaggtgtttgtagttaaacaacaggagattgataaattatgttatatacatgtgatgctatgttttaaagaggtactgatatgataaaagatgtacgtggcataaaattaaatgtactttattaagtacttttccaagtgtttacggaatgagtgcatttttgaaaaaaaaaaagtgtattcgaacttttaaaaaagctttaaaagctttatacaatgaacgattgagtgattataagagctggcgggggaatgttaagaggatgatagggagctaagtttaacagaacaattcacctctttatcttgtgacacctacgagcgcatcaattctgtaattgaaaaataaagtgcatatttgcagcagctgtactctcttcaggctgcaaggaggcttttcctcccggtaggcttgatttgcatttcactttcactttcgtggctggaaactttctacccacgtagtgggaggctgaggagccaccataaagctggggcttgacgagccgggaccgggacccgatctccacatatgcccggacttgttctgcggccgggttcaggagtcaaagaggcggggagacctgcgcgacgctgccccgccctgcgcccgcttcctccaatgtatgctctagggggcgggcctcgcggggagcatggacacgattggccctaaagtcttccccgcaaggccgtgggctggacagcgtggtgacgtcgcaacgcggcgcagggtgagagcgcgcgcttgcggacgcggcggcattaaacggttgcaggcgtagcagagtggtcgttgtctttctaggtctcagccggtcgtcgcgacgttcgcccgctcgctctgaggctcctgaagccgaaaccagctagactttcctccttcccgcctgcctgtagcggcgttgttgccactccgccaccatgttcgaggcgcgcctggtccagggctccatcctcaagaaaggtgttggaggcactcaaggacctcatcaacgaggcctgctgggatattagctccagcggtgtaaacctgcagagcatggactcgtcccacgtctctttggtgcagctcaccctgcggtctgagggcttcgacacctaccgctgcgaccgcaacctggccatgggcgtgaacctcaccaggtgagcctcgcggccccgggaagccggccccggcccgcctgcacctccggtgcttggcgggagcgctttcgagcctagccctcattggctggcgtgggccatccgcgccttctcattggcctgccacgcagtggggtggggcccagctgagcgcgcggttcggaaaagcccgcgctggctgctgcgcgaacctgctttttcgcgccaaagtcacaaagcgggtggtggcgggaaaatcaagggtttttccgcagtgccaggaacactgttccagggctctttgctcactaaatcctgttggccttgaatggacgctttagctgtggctttcttgtttctgagacggtctcggtgtgttgcccgggctggtctccaacttctgggctcaagcgatcctcccggctcagtcgcggttgactttaaatgctttataatgcccttgcgagaaatgtggcagcctgtcatcctacttagtggcaggagattgtttctatccagaagggacactgctggtggtattttagtataaatactgccagatgcgtcccaaaacgtctgcattaataatggcatcctccagcagtccgcttaccctccaccagttctgagacggcctgatgggtgagagtggtaaccccttctaaccgcgttcgaaatacagcccttcagcagacggcgttgattttaaagcatgtgtctcctgtcttctagt

SEQ ID NO: 59 - DNA, 6664 bp, Homo Sapiens
tattataagggcattaatcccattaatgagggaaaagccctcgaggtttaataatcacctcccgaaggccctacctcttaataccatcaccttggggtttaagttccaacatatgcatttaggaggggcacataccttcaaattatagcaatccgcaagtgatatacacttcaggccctatggaacctacacttacccttggccatatccagccacgtggatgtcccacagtacttcactatcaatatgcccaaagtgatgctccatgccccatagctgccccttagcatctctctagaacagcaggaccctcagcctgttgcaaagccacacacccaagtcatccctgatgactccttctcccttttttaacccagtcccagctcctaaaaatatctcattgtcatttcttcctcttgaaactgacatctccccaagttcagcacctgctgggactgttgcagagccctccattgtctgctggctctgatgctgcatcaccagccctcttcatgacttttcccccctaactcccacttatgaccatgtcactgccttgttcacatttttttgttcaagtccaacgtctaatccaaaacttttagcatgaccttgaacattaccttcaaggtatagatattatttaactacctagcctaatgtttatgacccttgctgagcacccagattctgtttatgttcagcgtactgaattaatttcagtctacaaacttgcattgttctttcttgtcaatggatcaagctctccaccttcatttgtcttcttggcaaactctttttattccttaagactcagttcagtcaactttgctatgaagccttgcctgatgccctctccactatgttctgcacacagcagtcttcaccatattgcattgtaaacatttgcaccccacctaggtggaagatccacagctactcacctgttatccttgatcctcattagtcccaaggttgacatatgaatctcttctccctacaccatgcccagtttctaaaattccaatgagagattaaggtgggttgacatgtatgcatttaaagtacaactaccaacaggtttaaagtgatctctttctctttttgtggggcgagaatgaagatagggggcatggaggttgtatatgacaaacttttattatctgtattttacactttggattatttcttaaaatttacagaaaaatcacattacttttataatcagaaaaacacccaactctgtcatagcaacgatagttcagtattttcacttgtggtgaaaagacctgaatctatatatcttgtattttctgtcactttcctttctgaattaacatgaaaaaggataaatcttcttcttttgcatacattttccggcaacttttaaattttttttttctttttatatatttgtctgtatagagacagggtcttactatgttgccaagctggcctcaaactcctggcctcaagggatcctccaccttggcctcccaaagtgctgggattacaggtgtgagccactgtgcctggccaatttttaccatttttatccagtagcaatggaggccttggcaagactgattcattcattcatttatttattcgttcatttttgggctagggtagtacattcacgtggctcaatattcaaaagatacaaaactctcctttccacctctgtaccaggtcactcttgtattccacagagggcacatttttattagtttcttccacctccttcccgaagtgtattttcttttcttttcttttttttttagaaggagtctcgctctatcactaggctggagtgcagtggcgccatctcggctcactgcaacattcgcctccagggttcaagcgattctcctgactcagcctcccgagtagctgggattacaggcatgtgccaccacgcccagctaatttttgtatttttagtagagatgggttttcaccacgttggccaggatggtctcgatctcctgacaacgtgatccacccgccttggcctcccagagtgctgagattataggcgtgagacaccgcgcccggcccggaggtgtattttcaagcaaatgttctcacatttttcttatctaaaaaaaacacttgtcttgacctgggctgccataacaaaatgccatagactacgtgccttaaacaacaaaattttattttcactcagttctggaggcttggtgtgcaagttcagagggcgggcaacatcaggttctggcaagggctgacttcctcactgacaggtgccttctcattctaacctcacatgagagcaaccaagctcttcagcgtctcttcttataagagcactaattccatcacgagggccccaccctcatgtcctcatctaaacctaattacctcccaaagcctcatctccaaacaccatcccagtggggtgaggccttcaacgtatgaattagcggggtggggggacaacaaacattcagaccatagaaatacgtaaatataagaaacaaaaccaaaaagacttatgtgcaataccaactgatcttttcttttccttccaaaatggagtttaccaaaatacaaatatgaagtttttcagagcacataccttcccctgctctcctctgcagtttttttttttttaataccacctctagggtagttttcctaaaatatggttccaaggctgtgtgtacctctcctgctcagatcctttggaacagtgttcagcgctcatcaggattctgactgtaaactcccttctctgactttaacatcacaggatgcagtactccctacattctaccatggggggcaccctgaattacctgggttgactttctggcctctgtgctctacttatacaatttcctctgtatggaaggcccactccagaatcctttccccagcctttgttcaaatgtcacttctgctagcattagcagtttcctcctctgggttctcacattgccctgtaacataagttacaaggtaagtaccagaagagaattcccaattatcatcctgctcccctaccctcaacacctccagcggtaactgtatcttattcatttttgtgtctatgaagcacagtgttgcactttggagatactacatagaagttggcccaaagggtaataaactgtatttgccaagatgatagcatggatttacaataacctctgaaactttataaagaaagatgattgagttaaattgatacacctagcatcacagctgtggaagcttgtggtcttctttatgttaaaggtaaaatggatataatgaattagttgccatttttagatgatatagaagttgaattcctcttaagcctctcaaagagaaagacatattaaaattcattaaaaccagtaccataaactgcacagaacagcctggttccctagagcacttctctggggcagtgagttttcatttaaaaaatgaagtttggattttaaacataagttttaaaagtgattaggctccagcaggagttcttaaattcctacctacaccatgactcccaaatgctctgcctctgttgcctaggaacaaaaattgtcaaggttgagccagatgcaatgtataacaccagatgatagatgcagctcattgtgttaaaaggtgttaaacacttaagtgcatgtgatatactctatatcacaagggtaaggaagttccattccatatcctgatttgggtcttctaatacatacttgtagtggatgtggtaatcagtctttgttctatgtcccattaggatcaatgcaaccagaaatccttaaaatggatttttattatgtctagctctgttttactgttctatttgtttattttaaaaagattttagaatggtgtttaggttgggctggtggctcacgcctgtaatctcagcactttgggaggccaaggcaggaggattgctggagcctaggagttggagaccagctagggcaacataaggagacattgtctccgcaaacaaacagaaaaaaaaaaagtaagaaagaaagagagaaagaaggaaagaacaagaaaaaggaaaaaaaaattaactgcagtaagtgcagaaatctctctcaaggatatgatggatggcaatgaagacagagtttttgacactggattatttaaagcataatttaagcctctttctctcccctcatagaattgtgaatttttgtgttttaattatatttaagccaggcgtggtggcgagtgcctgtagtcgcagctgcgctggaggctgaggccgattgcttgagcccaggatttggaggccagcatgcgcaacataatgagacccagtctctaaatgcatgcctctctctatatatttaaaattctgatgtgaaaatattttaaaatttaatacatttcaaatgtttttaattgtataataaacaaaatgtaaataataaaataatttaatattaaattcaaaaatgaggtagaaacaaagcacagcgatataaataataaattttcctttacatttttgaggcggtcttttgagttttccatttccttcttaaggtcactgaaatgtgctccttggagccagcccgcaaatcacgcatttagaaaaacataactatacactcctaaccctaagtattagaagtgaaagtaatggaatctcgatgtaaacacaatatcacttttttgatgagctattttgagtataataaatttgaactgtgccaatgctgggagaaaaaatttaaaagaagaacggagcgaacagtagcttcctgctccgctgactagaaacagtaggacgacactctcccgactggaggagagcgcttgcgctcgcactcagttggcgcccgccctcctgctttttctctagccgccctttcctctttctttcgcgctctagccacccgggaaggcctgcccagcgtagctgggctctgattggctgctttgaaagtctacgggctacccgattggtgaatccggggccctttagcgcggtgagtttgaaactgctcgcacttggcttcaaagctggctcttggaaattgagcggagagcgacgcggttgttgtagctgccgctgcggccgccgcggaataataagccgggtacagtggctggggtcagggtcgtgtctaggggacggccgagggcctcggagggcgagtattgaggaacggggtcctctaagaaggccggactggaggtcagggatctgcgcggggcccggctgggcctcggggggcggtgggcagggccttcgcctgggtctggccgtgtgagccacactgggctggctttagagggaggctatgggagcccagcctggcggggttaggcggcgtgggggtgggggttcggggctgcagtcatgagtcgaggtcggctgttctcaggaactgcctgaagaggctttcgggtcttgattgaagcaaaatccgctcccccacgctgagcgcctgcggagtagcaggctctttcctgggcccggcccctgcgcgccctgccatcccgcctcgggggtgggaaagtgggaccgcacctgggccaggtacaggcgcgggtccctagagccaggccgccctgagaaaccgatcctggaactcgtgggccttcttgggcttgctctgcccacggccccggcccacctggagctgttaagaacagtcagcccaggcacttaactctcatgagcagtgtagtgcagtttttttcatttaaaaagatacatctctgcttctttctggattgatttttctttgaagatgaatgtgagaaatagaacttaaaggtctattctgagtgtgctttataaatgattttatcatcagtgatgggtgttagaaaaatctaggtaattatgcctggagttctgacgtttcattggcaaacttcagaggaagtcttgaacttctggttgtcagcttttttttttaacccattcattgtgattcaagtataccgtttttctgcttagtccttgacattgtttaggttataattagaattttatctgtggaattgcacttttcattcttttgttttacggtgcttaagtgatatttcctactcttggaaaaagtaccttgaaagtcttgagcatgtttgtctgtgacctcagcaagcagaggaaaaagattaaaattgtcacgtgggcaactgtaaacacttaaaatgtttttgtcgttttaaacaaaattttcctaatgaacagtctgaacacattttagttctgtcctcataactttaaaaaataatgttttgaataaaattaggagtatcataaagcggtataaatttgttgaaatatttgggtataactttggcacacgcaggtactactttaaagtgtcacaaaaagggaacataattctggtttttgtttggaaagaatagacaagttgatacctgaatttgagggttattttgattggaagaagctaaatactacactagtatagaatatacacgtttccaatgtctcaggagtcaagaaggatggaaagttattgtaggagtccttacccttgtaaatattgtttgaatgtaattaatatttatggaatacttatgctgcagtaggcactgtggaaaatgctttacatatagtgtttcattaatgcttaaaactactcgagttagtggcatgtaattaagtcagtttttccttcactttagg

SEQ ID NO: 60 - DNA, 6815 bp, Homo Sapiens
ctgcttgcgaactaaaaattcagagctctcttgtgaatcatgctgccaagaattgcagacttaagcctcaagattgtacgaatttaaattttgactttatggcctcagttggcatgaagatacaaagataatcttctagcaaaaacagttttgaaagaccgggcgtgatggctcatgcctataatcccagcactttgggaggttgaggcgggtggatcacctgtggtcaggagttcaggaccagcctggccaacatggtgaaatcctgtctcaactaaacatacaaaaaaattagctgggtgtggtggcggacacctgtaatcccagctacttagggaggctgaggcaggagaatcgcttgaacccaggaggcagaggttgcagtgagccgagatcacaccagtgtactccagcctgggtgacaaaagtgaaactctgtctcaaaaaaaaaaaaaaatggtagaatgtcacatggaaagttaacttttagagatagtaatccagacacctataatattacattgtccttttaagtatctatatcaataaattaaccaacatttgttgacttaacatggccagggacagtgctgggttctcataattcccaagtaattctagccagaccttgtcctcaaggagcttatgagcagcatgaggagataaaaaacagataaataactctaattcaggaagaatttgataaatgcatgataactactactagaattcagaggagaggaaattttctttgaatagagactaaaggaaggaataatgaatgtggtagcatttgggctggacctattacaagaggcatgctttcccctgacaagccaagaaagtggggatttaaggtagaagaaaagaaaagccttgagttcttggagtattaaaattttgcttggctgaagcataggttacagtcggaggagatggactaggaaggatcgttatgggcagagaggaagccctgaactcatgggggaagctatgatttgggttaaagacagagctgggtcatgtcaagatggatcctgaagcagtaaaaaaaaatccaagaaagtaaacaggttgcagggtttaggatgaagtccgggaggaaagggcagagtggtccttaggaggccgttaggacaggtaaggtaatgggtctcaaagggagtggccgaaatgcaatggaaaaagagagattgtaaagctagaaggcttaggaattgcctcttgattaggtgtggaaggcaagggaaaatcagccctcgaagaagacagtgagattttaatctgggtggctggagagacagtgatgctgggcacagacacggggaagttgagaggaacaccatgtttgagaatggtgactcatatttgaacaagcctgcaatgcccagcagaccgctggaaaagtggggctggagacacattcaacggaggagccagatcaatctttacccttcttcacctgagagagccagtaagtcacggctggaacgtgtgtgtccagcaggagagggtagggagggaagccaagagagctgggagcccgagtgaagtttttgccaaaggcagaagaggaaagtcggcgtagcacagtatactttcccacccatgctcaccaagcccagggacaaggctcaccaagatgagtttggaagagaatgctggagagaaagtggttaagaaaactgcctttactgaacttcttgggctaactttgattgtaagtctctgaacaatcaaagcctgtgaggagacagctaaccttcttattcttcctatgtcaatagtgaacaattgcagatcccctttcctttccttctcctttcccctgttcctctctcctccctccctgaatactcttgcttttttctgggactggtctagagcatgggtggccattgttgacctacaggaggcaccactgtcaccaacaaagggtaacagtctttcttttcaatatttatttatatccagtatttattttcaatactgactatggagagagctctcctgtgctcaaacactgcaatactgggggtctttcaaagcacaaaaacatatatttgcatgatggcatcattaacatttttatggctttctatttcttttttgtactggtctcaagagccactcataaatctctcagtaactgcatagtgtcccagggccagagaccggccactcctggcattgtgattagagtcatttaatatccaaggtggtgactaatgtctggcaacaaagcctccattgggtgtcatgtgtcctgggaccctgagcgtgggcactctaggagcacctcagtattgcgtgttagtactatggccgagagaatagttgagaaagtggtcaagaggtggatccatgtgaacgccactgggaaatgagagacctcgttcccaatcacggtcagtgcaactcgaaagcctaaaatcagtttaaaacaaaggtatctacctttatcttatgttcatatcctaggcttttaataatacgtatttttcacatgtttacagaaagcagtcaactgagctattcatggaaaggtttgtgggtttggttaacgaagtggaggagtattacatttcagctggaaacacatccctagaatgccaaaacatttattccaaagtctggtttcctggtgcaatcggaggcatggcaatgcctctgttcagagactgggggctagggccagtaaggcatttgatccacatgtatcccagaaggcttttattgttaaattatattctttcggaaaaaccacccatgtcctattttgtaaacttgatatccatacacttttgactggcattctattttagccgtaagactatgattcacagcaagcctgtttttcctcttgcttggggtggcagcagaaagcatagggtactttccagcctccaagggtaggggcaaaggggctggggtttctcctccccagtacagctttctctggctgtgccacactgctccctgtgagcagacagcaagtctcccctcactccccactgccattcatccagcgctgtgcagtagcccagctgcgtgtctgccgggaggggctgccaagtgccctgcctactggctgcttcccgaatccctgccattccacgcacaaacacatccacacactctctctgcctagttcacacactgagccactcgcacatgcgagcacattccttccttccttctcactctctcggcccttgacttctacaagcccatggaacatttctggaaagacgttcttgatccagcagggtaggcttgttttgatttctctctctgtagctttagcattttgagaaagcaacttacctttctggctagtgtctgtatcctagcagggagatgaggattgctgttctccatgggggtatgtgtgtgtctcctttttctttcaggacttgtaggattctttgtgccatttgcatataatttggcaggttcacattttttaagagccctatgaagtgctttttgcatgtgttttaaaaaggcatttgaaaattgaaagtgtgatttatggaaattaaatcatctgtaaaaaattgctttggaaagtaatgattgctggccataaagggaaatatctgcgatgcacctaatgtgtttttaaccctttatttgctgacaatctatagtcattaatgctaaactcgattttggcttcagctacatttgcatattgtccaacaatggtctatttttgtaagaattagataaaatgtatacttgatataaaatagtcaaaaatgtaactcttagtaacagtaagcttggcatttagatagaccatgaacacttcgtcagatactctgttgggtgtttgggatagcaattaaaacaaagtattgatagttgtatcagagtctattaggctgcagcaaaggaagtttattcaaaagtataaactatccaagattatagacgcatgatatacttcacctattttttgtctccttaatatgtatatatatatatatatatatatatatacacatatatgtgtgtgtgtatgtgcgtgtgcatgtttaacttttaattcagttaaaaacttttttctatttgtttttcatctggatatttgattctgcatatcctagcccaagtgaaccgagaagatcgagttgtaggactaaaggatagacatgcagaaatgcattttaaaaatctgttagctggaccagaccgacaatgtaacataattgccaaagctttggttcgtgacctgaggttatgtttggtatgaaaaggtcacattttatattcagttttctgaagttttggttgcataaccaacctgtggaaggcatgaacacccatgtgcgccctaaccaaaggtttttctgaatcatccttcacatgagaattcctaatgggaccaagtacagtactgtggtccaacataaacacacaagtcaggctgagagaatctcagaaggttgtggaagggtctatctactttgggagcattttgcagaggaagaaactgaggtcctggcaggttgcattctcctgatggcaaaatgcagctcttcctatatgtataccctgaatctccgcccccttcccctcagatgccccctgtcagttcccccagctgctaaatatagctgtctgtggctggctgcgtatgcaaccgcacaccccattctatctgccctatctcggttacagtgtagtcctccccagggtcatcctatgtacacactacgtatttctagccaacgaggagggggaatcaaacagaaagagagacaaacagagatatatcggagtctggcacggggcacataaggcagcacattagagaaagccggcccctggatccgtctttcgcgtttattttaagcccagtcttccctgggccacctttagcagatcctcgtgcgcccccgccccctggccgtgaaactcagcctctatccagcagcgacgacaagtaaagtaaagttcagggaagctgctctttgggatcgctccaaatcgagttgtgcctggagtgatgtttaagccaatgtcagggcaaggcaacagtccctggccgtcctccagcacctttgtaatgcatatgagctcgggagaccagtacttaaagttggaggcccgggagcccaggagctggcggagggcgttcgtcctgggactgcacttgctcccgtcgggtcgcccggcttcaccggacccgcaggctcccggggcagggccggggccagagctcgcgtgtcggcgggacatgcgctgcgtcgcctctaacctcgggctgtgctctttttccaggtggcccgccggtttctgagccttctgccctgcggggacacggtctgcaccctgcccgcggccacggaccatgaccatgaccctccacaccaaagcatctgggatggccctactgcatcagatccaagggaacgagctggagcccctgaaccgtccgcagctcaagatccccctggagcggcccctgggcgaggtgtacctggacagcagcaagcccgccgtgtacaactaccccgagggcgccgcctacgagttcaacgccgcggccgccgccaacgcgcaggtctacggtcagaccggcctcccctacggccccgggtctgaggctgcggcgttcggctccaacggcctggggggtttccccccactcaacagcgtgtctccgagcccgctgatgctactgcacccgccgccgcagctgtcgcctttcctgcagccccacggccagcaggtgccctactacctggagaacgagcccagcggctacacggtgcgcgaggccggcccgccggcattctacaggtacccgcgcccgcgccgcccgtcggggtggccgccgcgcccggcaggagggagggagggagggagggagaagggagagcctagggagctgcgggagccgcgggacgcgcgacccgagggtgcgcgcagggagcccggggcgcgcggcccagcccgggggttctgcgtgcagcccgcgctgcgttcagagtcaagttctctcgccgggcagctgaaaaaaacgtactctccacccacttaccgtccgtgcgagaggcagacccgaaagcccgggcttcctaacaaaacacacgttggaaaaccagacaaagcagcagttatttgtgggggaaaacacctccaggcaaataaacacggggcgctttgagtcacttgggaaggtctcgctcttggcatttaaagttgggggtgtttggagttagcagagctcagcagagttttatttatccttttaatgtttttgtttaatgtgctccccaaatttcctttcatctagactatttgattggaaatatgtcagctatgatgatgactttctgggaagcgattcctgtcacccgctttcccctcctccccaccccacgtcctggggctttagagagcgattgggagttgaatgggtctgatttcggagttagctggctgagtccgcgctggagcggattgctggcatgtgacttctgacagccggaaatttgtaggtgtcccgcgagtttaaaacaagccatatggaagcacaagtgcttaaaaataatctcctgccagcccagtgacaagcctgtcccacccggggagaatgccccggagtggcgtgcgggtcagccagggtctgcgcctcgcagccactgtggaaggagcgcggccggtccaggacacaggagaccactttgtgacttcaatggcgaaggttgtgtgtcctcattttaatttttttccctacaagaattgttctttctccctctcctctccctcccattttctcttgcccagtttctcctttt

SEQ ID NO: 61 - DNA, 5527 bp, Homo Sapiens
ggcttcttgctgctgccaaattaacaactccagcccttgggtttagccacctgctgctgctaaaaatgttgctgagagtgatggagaggtgttttagttcccattttacagatcagaaaatcaaggcccagagaaactaagtagtcttggagataggagccatggcctctccacttgagttatcatcttgaaacatcaaggacaagccaactttatcaacagttttaggcctgtgagaaatgggcttggtttatcttgaagattgtaaacaaataaaaaaatagactgctccattactgatgagaaatatgagtcattctgccaggaattgaaagtacagctgcccataaaaaagctatgccggggtccagcctctccaggtccttgtgtgtgaaaaaccactcagtcaaagttccccttttatttctctttgtgctcagtaggatgctgaaatttctggaaaagacaatggaaatcaggggcaggaagagaacagtgtggggtgctaaacagatctcagcaacctccctgcccacggccatctctgcgcagacacctcgaccccccatgcgcaggtggagcagcgtttcctagttctttccagaggcttccttctgcctgccttccagccacatcgcctgagattgacaacgccctacagcaagacggaaacctccctttacagcaccaccttgcgattctgcagccacaaagttgagacttctgaacgtggcactcttctgttcccttactgtttcacgtgtacctgtgtcatctttcttgtttcatcgtaaacatacttctaaaattcccattttctttatttagaaatagaactacaagcggatggttaaacaatttaaacaaatggtccatggggaaaagtgaatttcacactgtcccccaaactttcagtgccttttatggagataattattgtttctaatgttttgaatattctttcagagatattttattcttatataagcatatgtgtatttgtgtccttccctcattttccccccacaaacactagcagactgttttgcaccttggttagctcatttaacatatcttggagccaggtgcggtggctcatgcctgtaatcccagcactttgggaggccgaggtgggcggatcacctgaggtcgggagttcgagaccagcctgaccaacgtggagaaaccccgtctctactaaaaatacaaaattagccaggcgtggtggcacatgcctgtaatctcagctactagggaggctgaggcaggagaatcgcttgaacctgggaggcggaggttgcggtgagccgagatcgtgccattgcactccagcctgggcaacagaacatatagatctgcttgatccttttcatgactgctacagctccattgaatgtatggatcatcagtgctccagctagcaccttagtgatgggcatttagggatcacaaacttcataagggcagaaacaatatcttacccatcctctgtttctgatatggtttggatgtgtgtccctgcccaaatcacacgtcaaggtaatcccccatgtcagaggtggggcctggtggaggtgattggatcatggggatggatccttcatgaatgggttagcaccatccctttggtgctgttcttgtgatagagctctcatgagatctggttgtttaaatgtgtgtggcacctccccactctcttggtcaagttcctgccatgtaagatgcttgcccttgctttgccttctgccatgaataaaagctctctgaggcttccccagaagcagatgccactatgcttcctgtacagcctgtggaactgtgagccaattaagcctcttttccttatgaattatccagtcttaggtatttctttgtaacagtgtgaggatgagctaatacagtttcctacactgtaacctaaggcaatgctttgcacaaagggatgaaccagattgcttagtaattaaaacacaaatacaaaccacaagcatatccattcatgaattgggggacagcttttatttgattctgagttctgatacctgctgctttgctttgttaaaaatgtgctagttctcattcagcttcctatcagtcatatcaccaaccaacatgtataacatgtacaatctgccaggtcaggaggaaacttatggatacaagaaatgtccctcccttctaggaaatgataatctgctttgggagagaaggcaggtactttttggcaaaagtgacataataaaataatcaaaaaaagatggatctttttttcttttttgagatggagtcacgctctgtcacccaggctggagtgcagtggcgcgatctcggctcactgcaacatccgcctcccaggttcaagcgattctcctgtctcaggctcccgagtagctgggactacaggcacccaccaccacgcccggctaatattttgtatttttagtagagacggggtttcactgtgttagccaggatggtctcgatctcctgaccttgtgatccgcctgcttcggcctcccaaagtgctgggattacaaacatgagccactgcaccaggcgaaaagatggattttttaaaaaaggtgttaggataatcaggtccccacctgcaagaaagtaaagttagaagcccacctcagaccatgcataccagcacaaaaatgtcaaatggcttaaagataaaatgttaaaacaagtctagaaaggtattaaaagaaaatatagaaaatacagcaccagcaaaaatttccctacacaagatgtaaaagccagaagtcataaaggaaaaggttgataaattagaatagataaaaatgtaaaacttttgtataatataagacacaaagaatgaatttaaagacatacaatgaaggttaggaagatgaagatgttttggcgatgagtggtggttacacatcagtattaatgtacttaatgttactgaactgtacacttaaaatgatgaaaatggtaatttttatgttatgtgtatttcatcacataaaaaaagacatgaaatgaatcggggaaaatatttgctacataactaagaatgaaggcccttaataaaatctgtaaaactatacacacttttaggaatgaatcaacaaataatttctatgaattagaaaaaagtgacaatccaactaaaaaatgaataagggatataagcaatgtgtttcacagaaaaaataaaaattgacaatgaagttatgaaaaaatgttcagtctccttagtaattgcacaaaacaaactaaaacaatgagacattacccctaagattagtaaatgttaaagaaaaataataattggtgagggtgtggggaagtgggcacttacacctatgtttggaaatataaattggtgcaaccttatagggagagcaatctcacaacattttccaaagacttacatgcacaaccctatggcagagaaatttattcctcttccaggattttttttccttcaaaaacagtgatgtggatgaaaaacacatgttcactactgcacagggtataacagctgaaaactggaaacgataatactcacattcccttcagtaggggaatggttaaataaattttacaagccatctggtagataccaggcatgagctaaaagttagggtccagttagagatggaaagcacaccagtaatttgaaagggaaaatgtaatatgaagaattattaactagtaaaagaaggctaactgctaaaggtacaagagcactcaagctgtctgcagtcagcaggccccggctggtgagcaggaagctgcccgctgggaggctgccaaagttccctgaaggtgagcaccactggttctacaagctgctggcagtcatggcgttaagagcaggaagagaagcaccagaacccggaagagaaatccagtcctctgctaggccttgcaccgtccctctggcgccctctactgacaaagccagtaaaattgtgccgctagcaaaggagatctttttatgggatgtagcttggtgtcaccaaagagaacagagtggacttggagctcagatgcaacacaatgattgatactggcacagtatacttaccctgcttttgtaaacaaaatggtatatgtgatgtctctctttgtctctctgtatataaaacaatatttgtttctacttattatgtatttatgtctttactctgcatgccaggagctaagtattttgcatgtattaactcattttgttctcataataaccttcacatgcaggaatcattatagctactttatgaatgagccgaggaaggcactgagacgttaagtaacttgcccaaggtcacgcagctagtaagtggcagagcaagaattactatggctttataagcctaggaaaaagtctgaaagaatcaaaatgttaacagcggggacctcaaggaagcattgaagaggccatgggagaagttttcactttgttaaaaaatcagtccttcaaataaataaatacagtgaggcttccccagaagcagatgtcactatgcttcctgtacagcctgtggaactgtgagccagttaaacctcttttctttataaattatccagtcttaggtatttctttataacagtgctaggatgagctgatacagtttcctacactgtaacctaaggcaatgctttgcacaaagggatgagccagattgcttagtaattaaaacgcaaatacaaaccacaagcatatccattcatgaattggggggctgctttgtgtgcatagataaggtatattttttaaaaaaattatttttccaagaagaaaataaaccagttaataaacgacaactcacagtgccaggaagtgagaaacaagtgtgtgataaacggtggagaatgggagcactctccgcagtgggcgggaggagacgaggagggcgttccctggggagtggcagtggttggagcaaaggtttggaggaggtaagtcatgtgctctgagtttttggtttctgtttcaccttgtgtctgagctggtctgaaggctggttgttcagactgagcttcctgcctgcctgtaccccgccaacagcttcagaagaaggtgactggtggctgcctgaggaataccagtgggcaagagaattagcatttctggagcatctgctgtctgtgagattaagcactatgtatattgctttattcactccccacagcaaccttaccaagcagttcttttccacgtgaaaagatggaggctgggtggagcaaaaggaggtatttagagtcctcagcaagtgagaggcagagctgggatttgaatccagatctgcctgatactgaagtctaggctggttccacctctccggactgctttccagggagtagaagacagatattttaccttagctggctgcttctagaagtctgaccctgctggctcaaaacgactttagttccttgcccagaggctgcgggctgcgggtcaagacatcagtagaaggagggcccagccagagaggctgacatgggcttctactcaccgtcatctctccttccttccagg

SEQ ID NO: 62 - DNA, 10224 bp, Homo Sapiens
agcccccacagccccagtaccgccctccccatcctaccccgactgcgtccctgctgtttatctttgcccacccacctcaaccccagtgctcttttcagtccttgggcctcaggtgacacaccagctagtgggacatgggcccccacaggcattctcagcccaacccagccccttccttttccttggccccctggccagcacctgcatcacactggcctccactggacacccttgcagcttcgggccttcctcacagacacactgctggaccagctgcccaacctggcccacttgcagagtttcctggcccatctgaccctaactgaaacccagcctcctaagaaggacctggtgttggaacaggtaggcactggaaagttagctgctcaggaccactgtcccactttaccagcaccttcctgccactctccacttctctctcctagatcccagaaatctgggagcggctggagcgagaaaacagaggcaagtggcaggcaattgccaagcaccagctccagcatgtgttcagcccctcagagcaggacctgcggctgcaggcgcgaaggtaaggcctgtggaaatggcagggagggtggaggggatgcaggaggcatggatgtgggtggggtgcccccaccttccagggccagtcagaccttcctgactttcccccaggtgggctgagacctacaggctggatgtgctagaggcagtggctccagagcggccccgctgtgcttactgcagtgcagaggcttctaagcgctgctcacgatgccagaatgagtggtattgctgcaggtgagggtatcctagaaccttggacctctaagccctactcccacatcccccacatgcattgccatcctcaatacccacctgcctgcagggagtgccaagtcaagcactgggaaaagcatggaaagacttgtgtcctggcagcccagggtgacagagccaaatgagggctgcagttgctgagggccgaccacccatgccaagggaatccacccagaatgcacccctgaacctcaagatcacggtccagcctctgccggagccccagtctccgcagtggagagcagagcgggcggtaaagctgctgaccgatctccctcctcctcaccccaagtgaaggctcgagacttcctgccccacccagtgggtaggccaagtgtgttgcttcagcaaaccggaccaggagggccagggccggatgtggggaccctcttcctctagcacagtaaagctggcctccagaaacacgggtatctccgcgtggtgctttgcggtcgccgtcgttgtggccgtccggggtggggtgtgaggaggggacgaaggagggaaggaagggcaaggcggggggggctctgcgagagcgcgcccagccccgccttcgggccccacagtccctgcacccaggtttccattgcgcggctctcctcagctccttcccgccgcccagtctggatcctgggggaggcgctgaagtcggggcccgccctgtggccccgcccggcccgcgcttgctagcgcccaaagccagcgaagcacgggcccaaccgggccatgtcgggggagcctgagctcattgagctgcgggagctggcacccgctgggcgcgctgggaagggccgcacccggctggagcgtgccaacgcgctgcgcatcgcgcggggcaccgcgtgcaaccccacacggcagctggtccctggccgtggccaccgcttccagcccgcggggcccgccacgcacacgtggtgcgacctctgtggcgacttcatctggggcgtcgtgcgcaaaggcctgcagtgcgcgcgtgagtagtggccccgcgcgcctacgagagcggaaggggcagccaaggggcagcgcagtcgccgcgggtcaagtcgcggcagagggggtcggcggggacagctcccgaggactaggtccgttactttcgccccatcgctgaagagtgcgcgaaaatggtttatcccttgtcgcactccactcgtatctgggccacagatgagcagaggtggctgcttatatgtaaaaatacgctgattttaagtttcttatctttaaaatgccttggcccttcttgagaaagggtttgtgcctactgtcctcggagtccatcttcccaggcttgcctcttctcaaacactcatgaccccctccagaacctttagggtgaagggaaattaccacctatgggagggagcctggaaaaatttagaacctttggtgggccccctgcaagcaggagttttgttgagtctttatttagcaaacacccttttctgacccagtgaatcagatgctaaaatatgcacgcagccacacacccagcagtccttctgcacccctgggaatcgccagcaagcaaaggttgctctcccctgggtagacaccagctggaatcaccaggggtgcttttacagtcctccccgctagcctggatcccaccgcagacctgttgaatcaactgctgggagtggaccctaggcatcagtaaattttaaaaactccccaaattattgtaacatggagtctgggttgagcatcactgctctggcctatttaggaacttgtggatggatagtgtcccaggtctgtgtgtgcatggagaccctctcatccggtacaagaggacatcacaaattcagctggggggagcacaaagttgtgacagaatgcaaagaatgaacaaggggccgagcgcggtggctcatgcctgtaatcccagcacttcggaaggcggaggcgggtggatcacctgaggtcaggagttcaagaccagcctggccaacatggtgaaacctcatgtctactaaaaaataaaaaaaaatgagccaggcgtagtggcgggtgcctgtaatcccagctactcgggaggctgaggtgggagaattgcttgaacacaggaggcggaggttgcagtgagccgagatcgtgccactgccctccagccttggcgacagagtgagactctgtctcaaaaaaaaaaaaaaaaaaaaaaagaacaaggctgggacattgcagcgttctcaaagagaaataaagtagccatggagataagaagcaggatgatttgggcatgtttatcagaggtagagacaagggagaaatcaaagataagtttgggcttttgtctccagtaactgggagcctagtggccatttttgctgcaaagaggaagctgggcaagtgtagcagtgaggctgaagaaaagggaattaaattttggccatgttcacttgaaacgtcttttagacatcctagtgaaggtactggcacggaggatctagtctgagggtttaggtcagtgtttcagccgtggatctggggcagatgaatgtagacagaccaggccagtgatcaggactgagcccagacttcatcgtgagatatggaagttgagtcagaatctgcaaaggagctgagcaggagctgcagggggtaggaggaaaactgggagagtgtagcccctgggagtcaaagggagcaagcttcaaatgatgctgagggggtgagaatggagaatggaacactggattccatttggtagtacacagatcgctgaggaccctgtcccgggcagtttcctggaggaagaggcaagcctggctggagtgggtagaggggagagtgaaggcgaaggattagagtgtatagagaccagtgtcttggtctgaggggagtagagacaggtgacaaccacagggcagacgtaggttaaaggtgtttagtttttccttcaagtaaatgggcagatgtattccatatacgttcccagtgaagggccgggtgcggtggctcaagcctgtagtcccagcactttggaaggccgaggcgggtggatcacctgagatcaggagtttgagaccagcctggctaacatggtgaaaccccgtctctactaaaaatacaaaaattagctgggcatggtggcgggcgcctgtaatcctaggtactcaggaggctgaggcagaagaatcgcttgaacccaggaggcggaggttgcggtgagccgaaatcgcgccattgcactccagcctgggtgacaaaagcaagacgcagttttttgttgttgtttttttaattgccaatgaggaaaggggaagttctgtgctaggcgatagagatccaactgttgagcaggcctctctgcctgtggccttccggccggtttccagacgcccaggtggccaacattagagtccgcgtagcagtgtgaggtaacccactgagataggtcgggcctgcggagcctggcgagcagcggccctctccctggggcttcccttcaatctccgggacatttccccgacctggagctcctccgcctcaccgccaggcctctctgcagattgcaagttcacctgccactaccgctgccgcgcgctcgtctgcctggactgttgcgggccccgggacctgggctgggaacccgcggtggagcgggacacgaacgtggtgagcgcggggccgagggcgtatgggaagggcgaggatgggcaggccacagtgcaggcattctcgagggctgcctgggtgccgcgcgcaaggagcgttctaattgccgatttcccggcggcacagagaggctaattctgcgcgggggctgggaggggagcctggattgccggctccgcaagtactccacccgctgcaagcggacccgggcccaggctgacccaggctccgcgcacgcgcacttcccgcaccttcccgccctcgcctccggccagaggccactcttgtgcgcttgcccggacgctggcacccgcccccgttccctgtggtaggtggggtctgtgagtggagctccggagcgatgaggtcattcctgggggcgaagcgtgcgtgtccccgccccggcgttcctgccccaatgagacaagagctagatcccggcgatctacgtttcagtcttaacggttgcggcgcggctctggcccgggcgcacgcgcacactgacacgcgtacacgcacgcacgcgaccggggcggtggttggcggctacggacgcgcaggactgggggacgggcgggtacggctatgggcgaggcggaggcgccttctttcgaaatgacctggagcagcacgacgagcagtggctactgcagccaagaggactcggactcggagctcgagcagtacttcaccgcgcgaacctcgctagctcgcaggccgcgccgggaccaggtgggagccagggggtgccggcgggcgggaggggaagcggtcgctggagctccgccctccccggtccgttgccgcgtcctgggtcggtgggcagccccaccctcctggctacgtggctccccgcgggtcctggccggggacctgcccgcggaaccgtgcgtaagaccccgattccaccgcctagatgctgggtgccggggcccccttggtttctgtcacagacaggttgaacacggaaaaagcagctgtatggcttgtggtagacctgagccgggcattatccagctatgactaaagccgaccgagcagtttggactagcacctcgatttccgcgttcgaatgctcctgctccctccttggggagactaggggaggatgtggagagggaagagtcctcgccaggaattgagaagtatgtttaggaaaacttgagaggcagagagagatcctgctcctccatctgcactcctgtatggagccagctgagccctcacctcttccctgttctggcctgtcaccagctgctggaatgtggaagattctgttcccttcctctagggtggatctggagaaagatttgggaatagataggaaagaagtcttgttttggaccataagcattcaggagcactttacccacaggaagggggaaagctagattataaaatgcctaaagaggtggaaaaagagatccaggttactaacccaggactgtaaggtgtctcggaacctcctaggtatccccattatcggagaactgtgtgccagatgccattggtgtgaccaccaggctcagagaaccaggcctaggcaccaggaaaaagaaacagggactgtgaagctcagtatgcctggcagaaatggggcggaaatccttatttaagtaaagaaagtggagttgtgagtgatgcttcagataaaattttacaaaattccttacaaaatgggtggtgctcagcacgccaaaatcttagcccagagcttgggtgcaagggttgagttgagtgtagacccctgggcttgtcttcatgtcagtcagtcctgagccattttccactgtggaaaggtgggaaaaccacaagacactaaccaattgaaaaggagggctagccacggaggtgcacacctgtaatcccagctacttgggagggtgaggcagaaggatcacttgaacctgggaggcagaggttgcagtgagccaagatcgtgccactgcactccagcctgagtgacagagtgagactctgtctcaaaaatagaaaaggaagccaagtacggtggctcacacctctaatgccaatgctttgggaggccaaggcaggtggatcatttgcaatcaggaattcgaggtcagcctggccaacatggtgaaaccctatctctactaaacatacaaaaattagccgggcatggtggtgtgtgactgtagtcccagctacttgggagactgaatcacttcaaccgggaggcaaaggttgcagtgagccaagatcgtgccactgcactccaacctgggtgacagggtgaggctctgtctcaaaaaaaagaaagaaggctgggcttggtgactcatgcctgtaatctcagcattttgggaggccaaggcaggcagatcacttgaggccaagagttcgagacctgccaggccaacatagcaaaaccccgtctgtactgaaaatacaaaaaaattatctggccatggtggtgtgtgcctgtaatcccagctactggggaggctgaggcaggagtatcacttgaacccagaagacagaggttgcagtgagtcgagactgggccactgcattccagcctggatgagagagcaagactctgtctcaaaaaaaaaaaaaaaaaaaaagaaagaataggaggctgagaagtcccaagttatatgttaaaaaaaaagaaaaaaacatcagttttaggccaggtgcagtggctcacacctttaatcccagcactttggaaagccgaggtgggtggatcatgaggtcaggagttcaagaccagcctggccaaaatggtgaaaccccgtctcgactaaaaatacaaaaaattagccagttgtggtggcaggcacctgtaatcccagctacttgggaggctgaagcagagaattgcttgaacccaggaggcagagattgcaatgagccaagatcgcaccactgcactccagcctggaaaacagagcgagactctgtctcaaaaaaaaaaccatcagtttttatggacagtggtagagtggagggtgggtccctatggtgcagaagggaaattccatggtcctgctgtgcatccgactgggatggctgttgaaatcctcttccagcaggcagctttggaaacagaaaaagaaactcttcctcctttagaatcctggaagggctgtgcagtgcctctaatccaagtctgttttctgagtgaagatagggaggttcatcaccagaagggaaggggctggaaatgaggtcactgcatcccagcccagggctcctgggtcatccaggaagggaagaaggagcaagctttctcattgttaggtaggagctcagagccatcacaagaacaagttagcaccatccctgtgccctccctgttctgcaaacaaaatgatcttccttcttgccctggcactagagtctgtctggcatttctcctgcccctagtactcctcccatctgggtacttcttcccgttggtgtactgaacaaacacatccactgctttattcacagcctccagccctcattttccagggcccacaccatttgtttttactaacccgacaaggttgcccactgtccccagtaaggtttgtactggggtttttactccagtgctcttctccatccaggagacctttggatacttggggaagaaaatgagcttaaattcccacccctccccctttacctttttcctgtaaggccctggccttagttcttagccccacatccttgctggctgcagaatagcagcgggttctgggtaaggagcattctgctaaaacgctccaccctgctccctcatctgtcctctccatttgtccccatcagatggtttaagtgcttaaggggactccagggcggagtcagggagaaccctggctctcctgggctaggcacaagatcattctacaggaaaccttgtgggaattcttctgggacaaagtattggtcagcgctgagcttagctgtgtctgtgacactcgcattctaactagggcctatctgacgtcaacaggaagtaaggctgatgcagtggggccaagggagtctgggagaagaaagtcggttcagagccctggctgccctgtcccacactccacccttccggcaagaatccagtccctagatgaggtggggagtgagtggtcgagttaaaaatctctgggtcgggtacgatggttcacgcctgtaatcccagcactttgggaggtgaaggcaggcggatcacttgaggtcaggagttcaagaccaacctggccaatgtggtgaaatcccatctctactaaaaatacaaaaattagccgggtgttgttgtggcacgcgcctgtagtcccagctactcgggagtctgaggcaggagaatcgcttgaacccaggaggcagaacttgcagtgagccaagatccagccactgcactacagcctgggcgacagagtgaggcttcgtctcaaaaaaaaaaaaaatctttgggccaaatctccagacagcacaggcaggtgcagaaacccaccaggaagctgcctgtgtacctctggcagattggagcctggcctaaagctgccttttatgcagcttgggtcaaggttaaacatcatgtcacagtgatttttctcactatgtgtgagacatggagaactggctccaagtactactctgtccactggtggctggactactgatgtgcaccactctccactcctctcaccctgcagtgggtcatggccccgtgccggggcagaggagaaaaatgggctgccttctccaggacaaaccctcactccaactcaactagggtgctgtgatcagaatgtgcaattgaggtgtgattttactgattttttttttttttgagaccgagtttcgctcttgttgcccaggctggagtgcgatggcacgatctcagttcactgcaacctccacctcccgagtttgagcaattctcctgcctcagcctcctaagtagctgggattacaggcatgtgccaccacgcctggctaattttgtatttttagtagagacggggtttctccatgttggtcaggctggtctcaaactcctgacctcaggtgatccacccgcctcggcctcccaaagtgctagaattacaggcgtgagccaacgtgcccagcctgtttttgttttttgtgttttgaagcagggtctcactcagttccccaggctggagtgcagtgacacgataatagcttactgtagctgcaatctcccgggctcaaacgatcctcccacctcagcctcctgaacagttgggactacaggcacaccaccacacctggctaatttttttttttctttttttagtagagatgaggtcttgctatgttgcccaagctggtctcaaactcctgaggatcaagtgatcctcctaccttagcctcccaaaatgctgggattgcagatgtgagccaccacacccagcctgattttactttaaatgagagtccctcttcagagtccctcagctgttcctggcccctggccatgtgccttcagttgcccctgcttctgtggtatccttaaggctacattcagtgctgaggccctaggcaggcagcagagagaagccaaatgattctgtctttcccttatccacccagagcatgcaaaaccaggagcagtggtgggttcagggtgggcaccagctatgtatatgtacatcagggacagggggccaaaggcagtcagtttccaaagactgccccagaggccatttttcagagaagccctgggttcctcaagggccctgtgtccatgctggcccatcttgcagg

SEQ ID NO: 63 - DNA, 11787 bp, Homo Sapiens
tgtgaaatactagccatgaagaaattttgacaataatatttcagtgcagaattgcatactagtaatagtatgcttggattttttcagatatgtggtattaatacatgtttggaattttaagtgtcagatcaagaagaaaaacttaagatataaagtggtgttttaataatttgagttttatcacttttaatgtcaagaaattattatacacataaactttatgtctgtaattttagatctattgttgcacaggatttctggcaattacaagtcagttgcatcaagtaaattctgatttacttggctggtggctttgtgaacgacaattaccctcaggcgggctcaatggaaggccggagaaggtattgtttgataagccatattctgctagctttagaaccttgagtgaatgctgctgctttgtcttgcctgtttctatattgtaaattggccatgagcttatttattacctttccctgttgtgaattttcagtaatatatcctactaaaagactccccttgacaaagtagacccccatgagttgaaatactcattgatcctaatgtccatttccagacagtcttgtacaggaatctccatgtttaaggacagttgattttggcaaattggattttttaaaaattagactacagaatttttgtttgcaatcttcttatttaaggaatacccagataatttggtttggagagaagattattaaattttcctccacataataggtctctcttatcaggtctgtaagggacaaatagtgaatactcatttgcaactatgtaattgtcctgtagagcaagtgcagccataagtggtaagaaatgaatgagtatggctgtgttccaattacaattattatggatggatatacttgtatttcctatgtcagatggaatcttgctctgttgcccaggctggagtgcagtgacgccatcttgattcactgcaacctccgcctcccaggttcaagcagttctgcctcagcctcccaagtagctgggactacaggcgcacggctaatttttgtatttttattagagacggggtttcaccatattggccaggctggtctcaaactcctgacctcgtgatctgcctgcatcaacctcccaaagtgctgggattgtaggcgtgagccaccgtgcctgacccaggactatatttaaatgatttataaatgtaaaaactattcctacactatagatttgactcaaggattgtagcttgctgtgcccctgccctctgaatgggacgtggtggtacagtagctgggattacagtcatacaccaccacgcccatccaattttgtatttttagtagagatggggtatcaccatgttcatcaggctgatcttgaactcctgacctcaggtgatctacccgcctcaacctcccaaagtgctgggattacaggcgtgagccactgtgctcggcctgtatttttatttttaaaccttagtatttctgaataacaacgggtagagaaacacccgcagtagctgtctacaatagagtgaaataaaaagcctgaggaactgtcaacagaaaaatgggtggccgtggggagcaccgggacctgcacttgcacacaatctagggcagcttctaatgagtctatgagttactcagggatctcattaaaatgagatcagccttgagtggggttttctttatagacttctgtcaccatattttgaagagcaagggtttagttgattttaagcaggtgtgtacccccctggacagtgcttgtagaaaaacagaactatacccatggatttcatgattatactgctagcttcttggttaaggggctgagttaggcattcattgcagatagaaacaaagcagatgcatgcttatcagtgagtactgagatatttagcatggttacctatgaattgaagtttggtctcttcttacccattaattgattatctttcattctaagcaagtatttcataccctgcatatcagtatatccctggatttcgtccttccacatggtttgacactttgaacatcagattacctaagagtgagacttaacccacttttaaattgttctcaaaattagggaaataaaagagaatgaaattgtggcaacttttttccctcctagttaccagatgtatgctactcatggtgggtcctggcttccctaaagataattggaagacttcattggattgatagagagaaactgcgtaatttcattttagcatgtcaagatgaagaaacggggggatttgcagacaggccaggagatatggcaagtaatatttctgacatatttctataaattatttcagcgtttgcattacttcatggttccatggatttccagggtggcattccgagtgttgctttgaaagcagtttttttttctatttattgtagagtgtatgaaggatatagaacaatcttacagaaatttcttgtcgcttgttgctaacaaaattagtatatggtaaaggtcaggtattcataatttgaagttaaagaagttttcattttgtgatctgtatataaattcttttttaaataggtggatccttttcataccttatttggaattgctggattgtcacttttgggagaagaacagattaaacctgttaatcctgtcttttgcatgcctgaagaagtgcttcagagagtgaatgttcagcctgagctagtgagctagattcattgaattgaaagttgcatagtatagttttgccattttaacatttctgtatttgaagtgcttatcgaatctaaaagtgactactgttaatattttgtatattgtgttaaattaattttaataaattatataattatacatattgtaaaataaagaccggtattttattttctgctttttattctgaagtcctgttattctgactacagttctttgtgtatacttctgtgtctgttatgttcaataactgagctaacataaaataactctaggtttctacttgatttttcccccatgtatacctttcatctgttctatagcaagttgatgtaaattggtttgtcaacaagaatgttaactgatgaaagtggatagaacccatacatgaattaaatgatgcacaaaataaatggctgttgaaatttggaaatgattgataggtttgaatatggttattctgaattggtcacagacttaggttaaatggcaatctaccatcttaaaatggggttgtgattcggactgtcctttttttttttttttttttttttttttttagcattttatatatcagaattacccaaagaaggagttgtcttcaaataaggaaacactaacgggtaagttgatggtcaccacagtatttttttgcacctgtctttttcttaaaaagctaaaatgggtacaatcactcttttttatttttttgtgacagaatctctgttgcccaggctggagcgcagcagcacgatctcagcttaactgcaacctccgtctgccgggtttaagcaattcagccgcagcctctcgagtagctgggactacagccgcacaccaccatgcccggctaatttttatgttactttagtacagacagggtttcaccatgctgaggagctggagaccagcctgaccttgtgatccacccacctcggcctcccaaagtgctgggattacaggcgtgagccaccacgcctggcctaaaatgagtacaatcactctaggggtttacagttttggtgaaagtgaggtattctctatttttaaattttattttttagagacagggtcttcctttcttccccaggctggggcatagtagtgcaatcacagctcactgtaaccttaaactcctgggctcaagcagtccttccacctcagcctcctgagtaccagggtctacaggtacctgccaccatgcccactatgcccagctgatttcttaattttggggacaggcactgtcttccccaggctggtctccggaggtgaagtaatcctctggcctcagtctcccaaagtactgggattacagggaggagccatcgtgcccgatctgaaaataaggttttttgatggaaattgagatttttctcaagtatgtttggaatgccctgtgcaataatcattccaagaacagagatgttcttaaggactgttgtcactgcatgtgggtaaaccgctgtgcataactggtttattgagatactcaacagtggcaggatttcagtagtggtgtaaattaatgtcttctaatagcttctgtatggcagtatccagataatttcgtcatgtttaatccatggatctctggtaagttggtactattggccttatttaaggaattttctaaaggtcaccactgcaaagctggagtttgaacttctagtgtgccattaactgatttatatgttagaaaccacagtactagaaattggtagatggggaattgttaactgagagatcttacccagtcagtctttccctgtttcctactctactatgcacacagccatgtgcatactatcttttgataatataactatctttcctatatttggtcacaagatcaaccttaggtgggttatgctgtgtgagcattacacgttctcattgtgtcaaaggcactgggtgtactgtgttgggtggtttctacatttaaagataagctagtgtgcttggacgtgtgggaaatgcatgtaacatttgcaataagggagattgggtgctgtgagaataatggggctaacaaatcgggtggtcattgatgggccttgcagagttctggtcagtctgatacctgcaggctgaggatgttccagtgaggttcatgtggaaagtgatgggtttgggaatggctggaagcagggtcatagacctgaagtacgtgaatccatgtggaaagctgagcctgcctgcgcctgcgcagtgcagcttagtgcgtcggcgcgcagttctcccgcccgtttcagcggcgcagcttctgtagttgggctactggaggggtcgctcagaaacctcatacttctcgggtcagggaaggtttgggaggatgctgaggcctgagatctcatcaacctcgccttctgccccggcggtttccccgtcgtcgggagaaacccgctcacctcagggtccccgctacaatttcggactccaggagactccacagagccgcccttcggtccaggtggtctctgcatccacctgtcctggcacgtcaggagctgcgggcgaccggagcagcagcagcagcagccttccctgccccgcgccaaactcccggccagctcaaggcaaggagtgattgggtggaggagtctccttgaggctagaggccggcagttcatggaggctcgggggcacgtgggtggtggttaccacagtgaagttgtgatttggttggggcgtgagatctgagtgccctgggaatttggtgagtctgggtgattagaagccttgacttttcaaattggttctattgcaagaccttgactgtggatggctcagttctgagaaaggctgaagtatcccatataacgtccctcacagtgtctgacaaatgacagtttgtgcgtgagtttgctgatagaagttgtgagctgatctttggctgctgaatttaattctccaaatcctgctaaggtgggataaaatagattaaattgaacatttcatctaattcagggaaaataatatgtttagtattaaaagagtgggctgggcggtggctgacgcctgtaatcccagcactttgggaaaccagggtgggcggatcacttgaggccgggagttccacaccagcctggccaacatggtgaacctcccacccccatcccctatctctactaaaagtacaaaaattatctgggtgtggtggcacgtgactgtggtcccagctactcaggaggttgaggtgggaggatggcgagtccgggaggtcgaggctgccgtgagctgagattgcgccactgcatttcagcctgggtgacacagtgagaccctgactcaaaacaaacaaacaaaaaagatgcatgtccttcaaatcatttattattttgttagtctctattcatgacaaagcatcaccatttttcacacacgattgcaacacaatggtaaagtaacaaataccaaatccaatggtcatttttcagttcatctcatgtgacctttctgctgtatttaatgttcttaatttctttatttttagaaacagagtctcgctatgctgcccatgctggtctcaaactcctggtctcaagtgctcctgcctcggtctgcccaagcattgggattacaggcatgagccactgctgcctggcctatgtttaatgttcttgactggtcttctcttaaactcttttaatttggcttccttgattccacttgcccctgtttttctgctacctcccagagaattgctgtgcccacctttgttcccaaattatgggcatgtcattaaagctttttttcctaggccacttctacctagatgtgactatctccacagctcagatctcatctacactccagacttacttcagactgtcttctgaagtttttattgatggactaatggatacctcaggctgactatatgattaattaaattcctctctgcactttttttttttttttgagacagagtcttgctctgttgcccaggctggagtgcagtggcatggtcatgactcactgcagcctcaaattcctgggctcaagcgatcctcccacctcagcctcccgagtagctgggaccaaggcatgtgcccctacagatggctaatttaaaaaatttttttgtagagacagtgttttcctacgttgcccagcctggtctcgaacttctaggctcaagcgatcctcctacctcagcctcccaaaatgctgggattacaggtgtgagccactgcacctagccctcaaactcttaagtgttcttccatccttgtagcttacttactgtaccaccagagttatgtggaaaatgatcttatcatgtcccttgccacttaaatcagtagacctgtatctgcaggtaaaagatcaaactctctagaaggatagccaaagcaattgggatcggtttctaatctttacagatttatccctcatcatttaatatttaccctgctttctaacaaaactgagctacttgcaattcctttaaagcaacatgaatgttcacattgtcagtctaatccctctcttcatcagatgcttggtcacccacttatttatcagtaatgataacattcactaatttatatgcacctactttgttctggcttcttactaggcagacggtatctttgatcctcacaataattttgcagagtagattttttttttgttcctgttttacagatagaaccaaggcccaaataggcgaacaaaggttcaaattatgttagcagctggggataataatctgtgctctcaatgaacttaaggttcagtagagaagacagacttaaaaatcaacaaatacacatttaagaaataactgtatttgaggtatttataatttttgaggtaggtataattaaagtatggggacaaaagtgggaaaagacatttcacagagtaagtgcaccttgaactggtcttcaagaataagtaggaagaagaatgccagccaaagggaaacagctggagcgcattcttgagaaaaacacgtgcaaaggcacagaagaatcatgtaaaactgctaataattttgcttggctagagcaggagagtgatctaggtagataaacttgaatgtagatatagttgtgagaattagatctgggagacaaatttaacccagagaccccccatattcaacaccaggtctctggttttggtgactggatagatggtagtagtattttctgattctgggaattttgtaggcaaagcaaattttagagggaagatgatgagctctgttatggacatgctgagtgtgaaaagcctgtgggatatccatatatttatattaagataattgaatataggaaactagagctaagaagagagaaacttgagggaaatatggatttgaaagttaccagtatgttgggaccacagcagagaatatgaagactatatagcaaaatagaggtcaaggaagtaggaggagaattaagacaagtgaatgagtttcaagaaagggtatatagtctaaaagtagtctgagaacaagaaacagccctctccatctccagtttccgcatctccagtttctggcaaccactctcttccttagctccctaaagcctagaaatgctaatggagcacattttatgctggttctacacacgtctttatgatagcacccctacaccctgtccacacctttgtaaatattctctttatcaaattatcccagtttgagtatatcattgattcctgctggaacccatataatgaagttatattttaccctatggtgagtatggggagacacataggaattgtaagaaagagagatactgatcagatttgcttttcagaaagattattggtgatgattcgaagaatagattagagaggtgtaatactggaagcaaggagaagaagaagtaggaaacttgcacaaggaccaaagaagatacaggcttaaaatgggctgggaggagtagagagggatttaaattttagtgatgttaaaaaaaaagaattctagcactcagtcactgagtgttagggttgatgaaggaagaattgagaatgtctcctaagcttatgacttgagtgacaagggacaagctggtacaattaaccatactggtaataaagaattaattttgagggaaagatagagttcacttttggacatttagaatgctgggaagatacctaaaggtttatgcccaagagatagatatagtgacctggagctacattgtctgatagaatattctgtgataatagaaacgtttcatacttatgctgtccgatgtggtaactagtagccgtatgtggcttttgagcatttgaaaatgttgctagtgtgactgaggaacagaatttaaattgtatttaattttgatttagttaaatactcacatatgctgctttattgaacaatgcaggtatagagctgagaacggtttttgcacttttgaaggattaaagaatcaagaatattttgtgatattaaaattatatgaaatttagaattcaatatgtagaaataaagccatttttaattgaaacatagccattctcatttatttatgtattatctatgactgcttttctatgatagtgtcagagctgagtaattgtgacagtgattatatggcccacaaaagcctaaaatatttgccatctggtcctttatttaaaagtttatgggctgggcatgatggctcatgcctataatcccagcactttgggaggctgaggtgggcagatcacctgaggccaggagttcatgaccagtctggccaacatgacaaaaccctgtctctattaaaaatacaaaaaaaaaatagccaggtgtggtgggcatgcctataatgccagctgcttgggaggctgaggcaggaggattgcttgaacctgggaggcagaggctgcagtgagctgagattgcgccattgcactctagcctgggcaacaagagtgaaactccatctcaaaaaaaaaaaaaaaaagtttatgctgaggcatggtggcttatgcttgtaatctcagtgctttgggaggctgaagtgggaggattgcttgaggccaggtgtttgagatcagcctgggcaatgtagcaagaccctgtctctataaaaaaaaaattagctgtgtgtggtgaggtgcacctatagtccatagttactcaagaggctgaagcaggaggttacttgagcccatgagcttgaggctgcagtgagctgtgatcacactactgcactccagtctgggcgacaaagagagaccttgtctttataagacagtaaaatagactgggcatggtggctcccgattataatcccagcattttgggaggctgagatgggaagatcacttgagcccaggagtttgagaccagcctgggcaacatggcaaaaccccatctctacaaaaatacaaaaaattagcctggcatggtggcatgagcctatagtcccagctactcgggagggtgaggtaggaggattgcttgagcccaggagttcaaggctgcatttagccaagatcacaccactgaattccagcctaagctacagaacgagagtctcacatacagacaaaaaggaaaaattaaaagtttagcaacccctggtttacagtttaaggagtcgttacagctatatacgaaggcttgagagttgtcagaaaatagatgttaatagaaacaaagaggagagatgagatgcctggagatgcataatgttgatttgtgagggaaagcttaaaagtatgaagccctggaggccaacagttaagaagcagaggaaaaaggagatggcaaaggaaactaaaagtggtttaaagagaattcaagatagagagttgtggaaatcaaagagaataggtgaacagagcccaaacattttaaaatttttttagaacttctatgtgccaagaggctatgctaggttgtttatgtacattatttaaaaattttatgacaatcctgtaaaataggtaatagcttacatcagtagataagtacctaaataaggaactgaagccaattgagtctaaaatgccatttgcataggggagagaaattcaatgaagaaattaacagaagaaggttaaaagaggtctaataattattatacaaatgaaacatatgtcttagtctgtattctgttgcttttaaaagaatacttgaaactgggtgattatcaagaaagaaaacatatttcttggaagtctggaggctgggaagtccaaggtcaaaggaggcacatttagtgagggtctttgtgctggtggagtctctgtagagtcctgtagtggtacagggcatcacatggagagggagctgagcatggtagctcaggtctctcatcctcttcttataaaaccaccagtcctactctcgtgataacccattaacctattaaatcatgaatggattaattcattcatgaaggcagagccctcatgccccatcacctcttaaaggccccacctctgtcctgccacacttcactggggattaaatttcaatgtaagtttcggaggggacagatattcataccttagcaacacatctggtatatttgaagattaaagggtaatttatgattttagccagagtagttgcagtgaacttgtagaggcaaaagctatattagcatatttttgtatatttatcaataatgtcattaattttgttataatctgtttattttcaaaaatcattttcacatgaaattttatagaaagtgaacatagtggttgggtgcggtgactcaggcctctaatcccagcactttgggaggccgaggcaggcagatcatgaggtcaggaattcgagaccagcccagccaacatggtgaaaccccatctctactaaaaatacaaaaattcaccaggcgtggtggcgggtgcctgtaatcccagctactcgggaggctgaggcaggaggatcacttgaacttgggaggtggacgttgcagtgagccgagatcatgccactacgctccagcctgggcgacaagagcaagactctgtctcaaaaaagaaaaaaagaaaaaaaaggaaagtgaacatggtataaattataatgactaatacatcattgcataattcaaatctttaagaattgactgttaatttttcaaatttagg

SEQ ID NO: 64 - DNA, 2455 bp, Homo Sapiens
ggagtgcaagaacacagaactaaaacagagcttgaaacttaaagaaagggagagacttgggggaggagtggggtggagtgacgtgatgtgctgctggaaaccagcagttggtggtttcctcttgtgcttcctcttctgtgggttttctcctgcttgtgggagggcctttttctctcctcccgacagaaaggctatctttggtgttcgttcccttgaactgtaacatcctgtaagggtatgattccatgcctctgtgtgggtgtgaattccctcatggtgaccctcaaaatctgcacacaggaccccttcccattgaggggaggggatcaaaacaactctacttctcagggtcctctcctgttccaactggtctgtgtccaagagaagccttaggtaaatggggccagcttgaagatcaaacaggtttggcagcctctcccggcctctcttttctctcctacagctttatagctacagctgccttgatatcaatattgactttggctggctggcatgactacccacagggtatcgtgccttaatttaccaggtgacaggcaacgctgccctctcctggaaccatccagcagagccagggctgtacccccaaatcctgcaacagaggtttccctccatctcacctccctgtccctgcatttctcctatctcagtagctcctctttccctctctgggcttctctttccactccctccccttcctgggcttggtaaactagtccctaatctcttcacaccccagattggaaggtgggtccctccctgacactccccagagctgtcaccaacctcctccaagtttctatagctccattgctcaacagatttgccaggggtaaccattaacccagcccttaactctgttcccccacctttcttgctggaggggattttccaattactggttagcacagctaggtcatctcacccccaccatctttcctaacttcttgggttggggggctggggaggaatctccccatctcagggtactaggaacaaagctggggaggatggtgcatttaaagggattatatatatatatatatatattttttttctttctccctcataaccccacccccgcaacacacacacacacacacacacacacacacacacacacacacacagacgcacaaataagctttatggagcagtgacttcattatgttcaccgctttgagtccaacccctggcccaaaataggcactaaatagttgccgaatgcatgaatgatagatacctctctgtcttcaggggtgtgtagaagtgcgaaggggtatgggcatgtcccagtaggggtgtgagtgttctgatcagaactacttctctctgccagaatttgatgtaattcgaatgcttccacctctgcttgaagggtttaaataataaattaggccctgtcgtgccattatgggggtggtcataccctgtacccaggaaacaggcacggtagggctgagacagaagtcctgcttgtttccgcttatttatttgaaacaccgctcatttaggtcttactttgtttgccaggcactgttctaagctctgtataaatattaactcagagggtacaaatattaacttaagagttgttgcaggaaaaaaaataagcgcctctggctctttaagtttggcctccccctcaaaacccccgcaacggtcccaaaccccttccagggactgggactacggaccctggtccgaccttctcgcgggcttcccactgcgccaatcaaatcccagaaacagtgagtgctagaggcccggctgctaagcaacggcagagggcgggaagtttgaacgttctggacccgccccgaaggcaaataggccaatcagcgtccagactcttcagctacggcagtccgcttctcctcctcgccctgtcggatctctaggctggatccgggcctctccaatcaacagcggctaggagggcggggcgcgtgcgcgcgcacctcgctcacgcgccggcgcgctccttttgcaggctcgtggcggtcggtcagcggggcgttctcccacctgtagcgactcaggttactgaaaaggcgggaaaacgctgcgatggcggcagctgggggaggaggaagataagcgcgtgaggctggggtcctggcgcgtggttggcagaggcagagacataagacgtgcacgactcgccccacagggccctcagaccccttccttccaaagggtaacctccgcgtgacaggaatgagggtggggcgcgtggagtttcccacaatctgtactttagttaaatacccgagaattcacctcctgtgtccacagctctccacgcccctcagccctgccccgcagccctgtagcagaagtacttagtgctttgcattctgcgcgccaccctaccccggcctcctctgtgaatcgttgcttccgaaccgccctcactttttgcatccgcaga

SEQ ID NO: 65 - DNA, 18 bp, Homo Sapiens
aatgctttcgtgatgctg

SEQ ID NO: 66 - DNA, 18 bp, Homo Sapiens
ttgcccagcggaccccag

SEQ ID NO: 67 - DNA, 18 bp, Homo Sapiens
aacctgcgaacgcttggg

SEQ ID NO: 68 - DNA, 18 bp, Homo Sapiens
gggcaacgccgaacccag

SEQ ID NO: 69 - DNA, 18 bp, Homo Sapiens
aaggaatccgtcttgtaa

SEQ ID NO: 70 - DNA, 18 bp, Homo Sapiens
ggagtccgcgggaccctc

SEQ ID NO: 71 - DNA, 18 bp, Homo Sapiens
aaagctctcggaggggct

SEQ ID NO: 72 - DNA, 18 bp, Homo Sapiens
tgccatcccggagggccc

SEQ ID NO: 73 - DNA, 18 bp, Homo Sapiens
tagactcggaggtaggca

SEQ ID NO: 74 - DNA, 18 bp, Homo Sapiens
ctcatttccgtgggtaaa

SEQ ID NO: 75 - DNA, 18 bp, Homo Sapiens
aagccacgggcttcactg

SEQ ID NO: 76 - DNA, 18 bp, Homo Sapiens
ataggctacgggctggag

SEQ ID NO: 77 - DNA, 18 bp, Homo Sapiens
gtggggctcggaggcaca

SEQ ID NO: 78 - DNA, 18 bp, Homo Sapiens
aagtaagtcgttgctgcc

SEQ ID NO: 79 - DNA, 18 bp, Homo Sapiens
agtgcatgcgcagaaggc

SEQ ID NO: 80 - DNA, 18 bp, Homo Sapiens
aggattccagggtattca

SEQ ID NO: 81 - DNA, 18 bp, Homo Sapiens
ggagtccccggcacacat

SEQ ID NO: 82 - DNA, 18 bp, Homo Sapiens
cagtggcgtcggaactgc

SEQ ID NO: 83 - DNA, 18 bp, Homo Sapiens
atttggctcgacctggac

SEQ ID NO: 84 - DNA, 18 bp, Homo Sapiens
agggaggccgttggcacc

SEQ ID NO: 85 - DNA, 18 bp, Homo Sapiens
taaaatctacagtcgggt

SEQ ID NO: 86 - DNA, 18 bp, Homo Sapiens
gctccgccgggcctgcgg

SEQ ID NO: 87 - DNA, 18 bp, Homo Sapiens
tacttgggcgggtgagtg

SEQ ID NO: 88 - DNA, 18 bp, Homo Sapiens
cctcttcatctacctcaa

SEQ ID NO: 89 - DNA, 18 bp, Homo Sapiens
gcccagccagcgggctcc

SEQ ID NO: 90 - DNA, 18 bp, Homo Sapiens
aaaaacccgcgagcttag

SEQ ID NO: 91 - DNA, 18 bp, Homo Sapiens
tgatgtggcgggactctt

SEQ ID NO: 92 - DNA, 18 bp, Homo Sapiens
ctaggtagcgggcagtag

SEQ ID NO: 93 - DNA, 18 bp, Homo Sapiens
taggtttctaaagaaact

SEQ ID NO: 94 - DNA, 18 bp, Homo Sapiens
accaggctcgtgccctag

SEQ ID NO: 95 - DNA, 18 bp, Homo Sapiens
tgccttctatgtgtgaga

SEQ ID NO: 96 - DNA, 18 bp, Homo Sapiens
agagctaccgctctgccc

SEQ ID NO: 97 - DNA, 18 bp, Homo Sapiens
tgccacaccggccagctg

SEQ ID NO: 98 - DNA, 18 bp, Homo Sapiens
tctgcacccggagttggg

SEQ ID NO: 99 - DNA, 18 bp, Homo Sapiens
aagatcttcggccagccc

SEQ ID NO: 100 - DNA, 18 bp, Homo Sapiens
tccaggtccgcaagccca

SEQ ID NO: 101 - DNA, 18 bp, Homo Sapiens
cacactggcgaaggccaa

SEQ ID NO: 102 - DNA, 18 bp, Homo Sapiens
tggaggcccgggagccca

SEQ ID NO: 103 - DNA, 18 bp, Homo Sapiens
ttaggccgaaaagacaac

SEQ ID NO: 104 - DNA, 18 bp, Homo Sapiens
gagcggccccggtgccgc

SEQ ID NO: 105 - DNA, 18 bp, Homo Sapiens
aatcaggccggacaggag

SEQ ID NO: 106 - DNA, 18 bp, Homo Sapiens
ctggtccgggaaaggcaa

SEQ ID NO: 107 - DNA, 18 bp, Homo Sapiens
acttgtcccgaccaatct

SEQ ID NO: 108 - DNA, 18 bp, Homo Sapiens
aatagttacggtcggagg

SEQ ID NO: 109 - DNA, 18 bp, Homo Sapiens
agggtcaccgcgtctatg

SEQ ID NO: 110 - DNA, 18 bp, Homo Sapiens
ggtggtgttggttggtga

SEQ ID NO: 111 - DNA, 18 bp, Homo Sapiens
actctgcgctcgcaccca

SEQ ID NO: 112 - DNA, 18 bp, Homo Sapiens
agttgctccgcagatact

SEQ ID NO: 113 - DNA, 18 bp, Homo Sapiens
tagcagcccgggtagggt

SEQ ID NO: 114 - DNA, 18 bp, Homo Sapiens
atccagctcgggggagga

SEQ ID NO: 115 - DNA, 18 bp, Homo Sapiens
ctgctccctccttgggga

SEQ ID NO: 116 - DNA, 18 bp, Homo Sapiens
ggagccttcggctgactg

SEQ ID NO: 117 - DNA, 18 bp, Homo Sapiens
tatgtacacgagcactgg

SEQ ID NO: 118 - DNA, 18 bp, Homo Sapiens
agcaggaccgggattctc

SEQ ID NO: 119 - DNA, 18 bp, Homo Sapiens
aagtgcccgcggctgccc

SEQ ID NO: 120 - DNA, 18 bp, Homo Sapiens
ggagtccggtcgggcccc

SEQ ID NO: 121 - DNA, 18 bp, Homo Sapiens
agtcatttcgtcacatgg

SEQ ID NO: 122 - DNA, 18 bp, Homo Sapiens
gtgtcagccgcctagggc

SEQ ID NO: 123 - DNA, 18 bp, Homo Sapiens
tcaagtgccggacttgtg

SEQ ID NO: 124 - DNA, 18 bp, Homo Sapiens
caaagaggcggggagacc

SEQ ID NO: 125 - DNA, 18 bp, Homo Sapiens
agtacttccgtttgagga

SEQ ID NO: 126 - DNA, 18 bp, Homo Sapiens
cagtgagacgaggctccc

SEQ ID NO: 127 - DNA, 18 bp, Homo Sapiens
ttataatgcgagggtctg

SEQ ID NO: 128 - DNA, 18 bp, Homo Sapiens
tcccagagcgctagggct

SEQ ID NO: 129 - DNA, 18 bp, Homo Sapiens
acatctggcggaaacctg

SEQ ID NO: 130 - DNA, 18 bp, Homo Sapiens
ctttgccacggtggtgga

SEQ ID NO: 131 - DNA, 18 bp, Homo Sapiens
agaggttgcgtcccagag

SEQ ID NO: 132 - DNA, 18 bp, Homo Sapiens
gctgcttccggctggtgc

SEQ ID NO: 133 - DNA, 2932 bp, Artificial Sequence
  chemically treated genomic DNA (Homo sapiens)
gttaagaataaaatatattaagataaggaaaatttgtagttaagaatagaaaaaaattatggttttgaagtatgagttatttaaagaaagtggaaatatttttagattatgtagtaaaaaataaagtgattttttttttttaaatttatgtaataaattgataggtaatatgtgaaagttatagaatgtagattagaggatataataaatttattttttttatgtttataagaagtaagaaaagttttgatgtgagttagtattgttttataattttgaattgtgtagattgtacgtatttttttttagtttgaagtaaatagtggataggaaaaaatattaaatgttggtagtaaatatggaaggaaattataattaatgtaatatgttaaaatatgttatgtttattttattaatttgaattaaaatgtaagaatttaaaatgttttggaaaaatacgggtattgatttgacgtttgaagttttaaaatattatatattttgaaatagtatttgtattttgaaatatttgtttttatatattttttaaaatttttttttttttttattttatttattattaaataaaggatgaatagatgtaatttagaaattgttaagtatgttgaagaaagattattgtagaaaaattttttttagtttttttaaaggtgttaggaagtagaaaggtgatatagaattggagaggtcggagtttttgtattaattgtattaaatgcgaatttcgagaaaattttttttaattacgttttgtagttatatggatatgaagatttatgtgaattttgaaagacgtgtttatataagttgaaatgtttttaatgatttagttgatgcgcgtttttttatttgttttttttagagaggtgtaacggaagttagaatattttttttggaaatttaatttgtttcgtagtttttcgaggaattagtatttagttaattcgggtcgggagtagttatttgtggtgaggttgattggttgggtaggaatagcgtcggggcgtgggttgagtatagtcgtttcgttttttttgttataggaagtttgagtttattcgagtagcggtttttttaagtttaaagaagtagaggtcgttgttcgttttttttaggtttttttattaaagtcggagtatttttttttaaaattttacgttttggtggtcgttttaaggagcgcgaggtaggggtacgtaaagttgggagttattatgggatagtttttaagtgttaggtttttagattttttgaatttggtttttacgggagaagggttttttgaggcgtggatagtgtgaagttttttggtaagtttatggggattaagtggggttagatttagatttaggagtttttggagtagcgtttaaatcgtagtggtattggattatgttgttcggagcgcgtatagttcgcgcggtgcggggatttgttttttgagttcgcgggcggtgggtgggaggaagtatcgttcgcggcgattggaatcgggagggagaatcgtattggcggcgggtaaagtttagaacgcgttgttagatttttaattttgttttcgtggagatgttggagatttcgcgtataggaaagtttttgtagtgtttatcgcggttagagtagttggggtattaacggcgggcgtttttttttattgttttttggtttcgacgggggattagaggttagttttatttttagcgcgtttgaggtttatgtatttggttaatgagttgcggtttttttttaggtcgggatggattttgaaggggatcgtaatggaggagtaaagaagaagaatttttttaaattgaataataaaaggtaattagtttgttttatttttatagtttatatagttgcgagatttgagtaatttatttttagtttttagttttgaaataaatgatatgttgttgtttttaattatttttaagaaacgtaagttagtttttggaattaatatttttgtttagagtagaagtttgttggttgagtggagtatagtatatgtattttttttgttttttttgtttttttttttaatgatatataatattttatatatttatgaaatggggtatatggaagcgttttttatatgttcggaatgtgtaatgattaagttcgggtatttgaaggatatattattttaggtatattttatttttatgtgttgataatattttaagttttttagttattttgaaatatataatatattgttaattgtagttattttcgtttgttatcgaatattggaatttatttgttttatttaatcgtttttagttatttattaatttttttttattttatttttttatttttttcggttttttttttttagttttggtgtgttttttttttagtttttttgttttagataggcggatgtttatatgtgtttttgttttatgaatttttgttttttaagtggtgttggtcgtttatacgtgagttatatgttgttggtgatttgttttgtggtttaggtttttgttttcggtaaatggttatgtaaatatcgcgtttgtggtttggttgatgagatagaaggttaaaagtatatttaggttgttaattggtaataaatatttgtatataatattggtaatgtaattatatagggaaaataattatttaaagtaaattttgattatggtgttttgtttttatagaatatttaaaattttattaaatagatttattgttagtagtaaattgtaaaatagattagtaagtttaataatattagaaattgtaatgtaaattataagataaattagttaaatatattaatattataagaaattaagttttttagtgtaagagaaaaaatataaatgtggaaattaaatatatttttaaaaataatgttaagtttgaattagaaattttaatatgaatt

SEQ ID NO: 134 - DNA, 2932 bp, Artificial Sequence
  chemically treated genomic DNA (Homo sapiens)
aatttatattgaaatttttaatttaaatttaatattatttttaaaaatgtatttgatttttatatttgtatttttttttttatattgaaaagtttggttttttataatattaatgtgtttagttaatttattttataatttatattatagtttttaatattattaaatttattagtttattttataatttattattaataatgaatttatttagtgaagttttaaatattttataaaggtagagtattatgattaaaatttattttaaataattattttttttatatgattatattattaatattatatatagatatttattgttagttaataatttaaatgtatttttgattttttgttttattagttaggttataaacgcgatgtttatatagttatttatcggaagtaagagtttggattatagagtagattattagtagtatatggtttacgtgtgggcgattaatattatttgaaaagtagaagtttataagatagaaatatatatgagtattcgtttgtttggggtaggaaagttgagaaagaggtatattaagattaagggaaagaggtcgggaagggtaaaaaggtgaaatgaaaagaggttggtgaatgattaagaacggttggataggataaataagttttaatgttcgatagtagacgagggtgattatagttagtaatatattgtatattttaaagtagttagaagatttaaaatgttattaatatatagaaatgaaatatatttaaggtgatgtattttttaaatattcggatttgattattatatatttcgggtatgtaaaaaacgtttttatgtattttattttataaatatgtaaaatattatgtattattaaaagaaagaataaaaaagatagggaaaatgtatatgttgtgttttatttagttaataaatttttgttttaagtagggatattgattttaaaggttagtttgcgttttttaaaaataattaaaaataataatatgttatttattttagagttggaggttagaaataaattatttaaatttcgtaattatgtaaattatgaaaatgaaataagttagttattttttattgtttagtttaaaaaagttttttttttttgtttttttattgcggttttttttaagatttatttcgatttgaagagaaatcgtagtttattagttaaatgtatgagttttaggcgcgttggaggtgagattaatttttagtttttcgtcgaagttagagagtagtaagagggagcgttcgtcgttgatgttttagttgttttggtcgcgatgggtattgtaggggtttttttgtgcgcggggtttttagtatttttacgaaggtagagttgggggtttggtagcgcgttttggattttgttcgtcgttagtgcgattttttttttcggttttagtcgtcgcggacgatgtttttttttatttatcgttcgcgggtttagagagtaggttttcgtatcgcgcgggttgtgcgcgtttcgggtaatatggtttagtgttattacggtttgggcgttgttttaggagtttttgagtttagatttaattttatttggtttttatggatttgttagaggattttatattatttacgttttaagaagtttttttttcgtgaagattaagtttaggaaatttgaaagtttgatatttgggaattgttttatagtagtttttagttttgcgtgtttttatttcgcgttttttggaacggttattaagacgtgaaattttggaagaagatatttcgattttagtggaaagatttaaaggaaacgaatagcggtttttgtttttttgagtttggaagagtcgttattcgaatgagtttaggttttttgtggtaaagagagcgaagcggttgtgtttagtttacgtttcggcgttgtttttgtttagttaattagttttattatagatgattgttttcggttcggattgattgaatgttgatttttcgagaaattgcgaaataggttgaatttttaggaggaatgttttggttttcgttgtatttttttagaaagggtaagtagagaaacgcgtattagttgaattattggggatattttaatttatgtagatacgttttttaaagtttatataagtttttatatttatataattataggacgtagttaagggaaattttttcgggattcgtatttaatatagttaatataaaaatttcgatttttttaattttgtattatttttttgttttttaatatttttgaaaaggttaggagaaatttttttgtagtggtttttttttagtatgtttgatagtttttgagttatatttgtttattttttatttgatgataaatggaatgaaagaaaaaggaagttttaaaaaatatatagagataggtattttaaggtataaatgttattttaaagtgtgtaatattttaaaattttagacgttagattaatgttcgtgtttttttagggtattttaaatttttatattttaatttaaattagtaaaataaatatagtatgttttagtatattatattagttgtaatttttttttatatttattgttaatatttaatatttttttttgtttattatttattttaaattgaggaaaagtacgtgtaatttgtataatttaaaattgtaaagtaatgttaatttatattagagttttttttattttttatgaatatagaggaaataggtttgttgtattttttagtttatattttatgatttttatatattatttattagtttattgtataagtttagaagaagaaaattattttgttttttattgtatagtttgaggatgtttttattttttttaaataatttatattttaaagttataatttttttttatttttgattataaattttttttattttgatatattttgtttttggt

SEQ ID NO: 135 - DNA, 7432 bp, Artificial Sequence
  chemically treated genomic DNA (Homo sapiens)
atttgaagttagagttatttagaggagaaagagttggaattgagaatttaaggaatgtttggaagtgatcgggttcgagtttatttaggaagaaatagaggttggagatatgagattgtgttgttatttttttttattaatttttgggttttattgaggttttattataagtttggttttgtagtttagtgattaggagaaattagatataagataataataatagtaatgattttttttttttttttgagacggagttttgttttttcgtttaggttggattgtagtggcgcgatttcggtttaatgtaagttttattttttaggtttacgttatttttttgttttagtttttcgagtagttaggattataggcgtttgttattacgtttggttaattttttatatttttagtagagatggggttttatcgtgttagttaagatggttttaattttttgatttcgtgattcgtttgtttcggttttttaaagtgttggggttataggtatgagttatcgcgtttggttaatagtaatgatttttgagtatttatattgttagtttttacggtaagagttttttttattttttgttttgttttgttttaagatagagttttgttttgttatttaggttggagtgtagtggtgtgatcgcggtttattgtagtttttatttttcgggtttaagttatttttttgttttagttttttaagtagttgggattataggtacgtattattatttttggttaatttttgtatttttagtagggatagggttttttattatgttggttaggttggttttaaatttttggttttatatgatttgtttatttcggttttttaaagtgttgggattataggcgtgagttattgcgtttttttttgtatttgtttaagtaatatattgaaatatgtattgtgttttttattttatggaggaggaaattgaggttagtaaatgaggttgttatgggaggtggagataggatttgaatttgttttagtgtaggaggtttaagagtttttgtttttttttagggtattgtgtgggagggtgagaaggagggaggtttatagaggtatgatttttgattgttattgttatttgggttttgttttttgaagtttttgttaagcggggaggtggtcgggggagggttttgttttgtgtagttttttttttttcggttcgtagagttgagtatagagggatagaggtacggaatttttagaaatgtttttttttagaaataggttttaggttttgtttgttttgtgtttttgcgtgttggttttggtttgtattgggggtgagaagaagtgggtggagggatgtggggtttatatttggtgggtgtgagtgtggttgtgtgttttgtggttttgtagttacgtgagatatgagtacggagtgtgtgcgttttatggcgtgcgtatgtatgtgcgtgtcggggagtgtgtgtgtcggtggttgagagtgaagtgtgaatgttatattggtataaattgggattatttgtgtgtgtgtacgtgcgtgcgtggaagtgggagtatgtagtcgtggtaaaaaagtgtatgtttgtgtgtatatgtgtatttgtgtgtatttgtttttttgtggggtatgtgtgtgtaaaatatttgagtgtgtggatatgtgtgagggggtgagtgtgtgttggtgtgtacgtttgtgttttgtatatgtatttttttttttttttttgagacggagttttattttgttatttaggttggagtgtagtggtagtagtggtgcgattttggtttattgtattattcgtttattcgttttaagggatttttttgttttagtttttagagtatttgggattatagatatacgttattatgtttggttattttttttttttgagacggagtttcgttttgttatttaggttggagtgtagtggcgtgattttggtttattgtaacgttcgtttttcgggtttacgttatttttttgttttagtttttcgagtagttgggattataggagtttattattacgtttggttaattttttgtatttttattagagacggggtttcgtcgtgttagttaggatggtttttatattttgatttcgtgattcgtttgtttcggttttttaaagtgttaggattataggcgtgagttattgcgtttggttaatgtttggttaatttttttatatttttggtagagatagggttttgttatgttgtttaggttggttttgaaattttgattttaggtgattcgttcgttttggttttttaaagtgttgggattataggtatgagttattacgttcggttatgtattttatgttaaaatgggattatattttagattagtattatttagtagaaatttaaatttttaatatagggttaggtacggtggtttatgtttgtaattttagtattttcggaggtcgaggcgggtggatcgtaaggttaggagatttgagattattttggttaatagatgggtaaaaatttatttttattaaaaatataaaaaattagttatgtatggtggtatgcgtttgtagttttagttattcgggaggttgaggtcggagaattatttgaattcgggaggtagaggttgtagtgagtcgagatcgcgttattgtattttaatttgggtgatagagcgagatttcgtttgaaaaaaaaaaaaaatttaatacgtatgtagataatgtgtaaggtattattttatgtgtatcgtatgtagtaatttttaatttttacgataattttgaggtagatattattatttcgttttataaaaggagaaatagttttggggagataggataagttatcggttaaggtatatagttagttatatgtggttttcgcgtgacggttggtttttgtaggcgaggttttgtttagatgcgtgggtagaaggtttggttcggaaagaggaattgatagtaaggttaagttaatgtttgtttttgggggtagaaagttattttttgttttttttttattgtttatagaggtagtttagatagggtgggggttataggagaacgaagggagaagggggtagtttttgggtagtaaaattaggtggtgaagggaggtattagaggatggtaattagagaggttattagaggggaattataggtagatagggtgataggagggattattgatataaggtgaagagatggtttagtcggacggggtggtttatatttgtaattttagtattttgggagttcgaggtgggtggattatttgaggttaggagttcgaggttttaatatggtaaaattttattttttttaaaaatataaaaattagtcgggtatgatggtagatgtttgtaatttttgttattcgggaggttgaggtaggaaaattgtttgaatttaggaggtggaggttgtaatgagacgagattatgatattgtattttattttgggtaatagagtaagagattgattttgttttataaaaaaaaagaaaaaagaaaaaaaaaaagagatggttgatggttaaagaggggttagcggttaggggatatataagggtaaaggtaggaggtaagaggattggtagggggttgtttttgggttatcgggagcgatataggatgagtatggagggaaagggagaaggggattttagggttttagtttatttaagttgttttttggttttatttagtatgttagttagaggtttaggaaggaattttgagttttttattaaagttaaagatgagtcgttggagtttggtgaggggtaggatgaaggagttgttggagatagtggtgaataggattagagacgggtggtaatggttttggtgagggtgtgttgggttgggtggtgggaggggatttttgggtttgagggaggaggggttggggtttggatttttgagttttagggaggaggaaagggtgggagtggggttgtgatttttaggtttgggaggagtggagggttagagttgagagtaggaatttttaggttatagagaggagcggataaatggggtagagaatatttggggagagttggggtttttattgtgatgtttttttttttgtaggagttcgagtatttttcggggttttatgtagatttattatgacgattatttgagggatttgggttcgtttattaaggtttggtttttcgaatttaaagatagttttttgaagaagatttatagtttgtgttttaggtttgtttgtggggataaggattagggttaaaatgtttataaaagttaggtgtggttgtggcgggtgtttgtagttttagttatttaggaggttgaggtaggatgatggtttgagtttaggagttcgagattagtttgggtaatatagcgagattttttgggggtaaaataaaaagaaaaaaaaaagtttatatttttttaataaataaagttttatttgtgtttttgtttggatttttttttagtgtggttagaaaaaaatttattttattgttttttaggaattaatgagtagaagaggtgatatttgatggggaaggaagagtagggaggtcgggaagggtattaaggaataatattttattgtgggtttgcggagaatgggggattttaaggcgtgttagttttaggagggtgagggtaggagcgtgggtggagttagtaggtttttatgatggtttttattgagagtttcgtttttgttttttataagttttgattttatttttagtgggtatttagtatttttaatttttttatagtttttaatttagtttttgtcggaggcgaatttttagagtgagggttttttgttatttgagagaaggttttttgtgacgtgattttgggggacgttattgttttttttgtttttatttatttttttcgtagttttgttggttaggattttggtttagataaaggatgggggttgtggttgtggagcggaagtgggttttaattattataaattttttttgtgttcgttcggagttggtgaggatagtttgttagagtttggtaagaaagggatttagggtgcggggataggggggcgttagtagggagagggtaaagatcgataaagtaggaattttaagaggtataatattagaagttcgtgttggaattatgattgtgtgtgtgtgtgtgtgtgtgtgtgtgtgtgtgtgtgtgtgtgagagagagagagagggagatggagtttcgttatgtagtttaggttagatttaaatttttgggtttaagtaatttttttgttttagtttttttagtagttgggattataggtgtattattatattttataaattatagaatttagaattgtagattatttgagtttttgtttagagttagggtggttgaggtggggaggattttttgagtttaggagtttgaggatgtagtgagttgtgattttgttatcgtgttttagtttgggtgatagagaaattttatttttaaaaaagagaaagaaaaagggataggtataatggtttatgtttgtaattttagtattttgggaggtcgaggcgggtggattatttgaggttaggagttcgatattagttttattagtatggtgaaatcgtatttatattaaaaatataaaaattggtcgggtgtggtagtatatgtttgtaattttagttattttagaggttgagataggagaattgtttgaatttaggaagcggaggttgtagtgagtttagatcgtgttattgtattttagtttgggtgatagagtaagatttagttttggcggaaaaaaagaatgaaaaaatttaaaaaattaaaaaagaattgtaggttgggcgtggtggtttatatttgtaatttaaacgttttgggaggttaaggtaaacggattatttgatgttaggagttggagattagtttggttaatatggtgaaatttcgtttttattaaaaatataaaaattagataggtatggtggtgtatgtttgtatttttagttatttaggaggttgaggtaggagaatcgttcgaattcggaagatagaggttgcggtgagttaaaattgcgttatcgtattttagtttgggcgagagaataagattttgttttggaaaaaaaaaaagaattgtagattatttgtttgtgtttttttttcggggattagattttattttttttttgtcgtatttttttattttttacgtgtggatgatgatattgtgttttgtgtatgtttttcgttattaaaagtgttttttttatagagtaggtgagaatttagtgaggagatgtagggatatgaggtttgatttagggtagagttttaaggtaatatatttgatttattgtaggtttttaatggtgtttgtagagtatttttttgtattgatttagttttagtaaagggtagaggttttgttgtgttttttgttgggtttagaattgtttaggtgtttaagaaagttttttaggttgggtttagtggtttatatttgtatttttagtattttggggaggtcgagatgggaggatcgtttgagtttaggagttttagattagtttgggtaataaaataagttttttatttttataaaagaataaaaattagtagttgggtatggtggtttatgtttgtaattttagtattttgggaggttaaggtaggtaaattatttgaggttaggagtttaagattagtttggttaatatggtgaaattttatttttattaaaaatataaaaattaggtggggtatagtggtttaagtttgtaattttagtattttgggaggttaaggtgggcggattacgaggttagaagttcgagattagtttggttagtatggtgaaattttatttttattaaaaatataaaatattagtcgggtatggtggtaggtgtttgtgattttagttttttgggaggttgaggtagaagaattgttagaattttggaggtagaggttgtagtgagtcgagaatacgttattgtattttagtttgggtgatagagcgagattttattttaaaaaatacgaaaataaaaattagtcgggtggtggcgggtgtttgtaattttagttattggggaggttgaggtaggagaattgtttgaatttgggaggtgggggttgtagtgagttaagattgtattattgtattttagtttgggtaatagagtgagattttattttaaaaaagaaaaaaataataattaaaatgttaaaattaggagtagaattatagaatgttggaaagtgaggtttaagaagggggttgtgtttaagtttatgtatgggaaatttgattgggatatcgagtttatatagagtaggattttagttttttttattagagtggggcgtgattataggaatagtcgtttttagttagtttgttatatgatatttttttaatgttttagg

SEQ ID NO: 136 - DNA, 7432 bp, Artificial Sequence
  chemically treated genomic DNA (Homo sapiens)
tttggaatattgagggggtgttatgtggtaggttgattggaggcggttgtttttgtggttacgttttattttggtgggggggattgagattttgttttgtgtgagttcggtgttttagttaagttttttatgtatggatttggatatagttttttttttgggttttattttttaatattttgtgattttatttttgattttaatattttaattattattttttttttttttgagatggaattttattttgttgtttaggttggagtgtagtggtgtaattttggtttattgtaatttttattttttaggtttaagtaatttttttgttttagtttttttagtagttgggattataggtattcgttattattcggttgatttttgttttcgtattttttgagatggagtttcgttttgttatttaggttggagtgtagtggcgtgttttcggtttattgtaatttttgtttttagggttttagtaatttttttgttttagttttttaaggagttggaattataagtatttgttattatgttcggttaatattttgtatttttagtagagatggggttttattatgttggttaggttggtttcgaatttttgatttcgtgattcgtttattttggttttttaaagtgttaggattataggtttgagttattgtgttttatttgatttttgtatttttagtagagatggggttttattatgttggttaggttggttttgaatttttaattttaagtgatttgtttgttttggttttttaaagtgttggaattataggtatgagttattatgtttagttgttaatttttatttttttgtagagatgggagatttgttttgttgtttaggttggtttggaatttttgggtttaagcgatttttttatttcggtttttttagggtgttgggagtataggtgtgagttattgagtttagtttagaaggtttttttgagtatttaaatagttttgggtttagtagggaatatagtaaagtttttgttttttgttaaggttgagttagtgtagggaggtgttttgtagatattattaaggatttatagtagattaaatgtgttattttagggttttgttttaagttagattttatgtttttgtatttttttattgagtttttatttgttttatgagagaggtatttttggtgacgaagaatatgtatagggtataatattattatttatacgtaggagatgaggaagtacggtagaaagagggtgagatttgattttcggagaaagaatataagtaaatggtttataattttttttttttttttaagataaggttttgttttttcgtttaggttggagtgcgatggcgtaattttggtttatcgtaatttttgtttttcgggttcgagcgatttttttgttttagttttttgagtaattggaaatataagtatgtattattatgtttgtttaatttttgtatttttagtagagacggggttttattatgttggttaggttggtttttaatttttgatattaagtgattcgtttgttttggttttttaaagcgtttggattataagtgtaagttattacgtttagtttatagtttttttttagttttttaaatttttttatttttttttttcgttaagattgagttttgttttgttatttaggttagagtatagtggtacgatttgggtttattgtaattttcgttttttgggtttaagtaatttttttgttttagtttttggaatagttgggattataggtatatgttattatattcggttaatttttgtatttttagtatagatgcggttttattatgttggtaaggttggtgtcgaatttttgattttaagtgatttattcgtttcggttttttagagtgttgggattataggtatgagttattgtatttattttttttttttttttttttttagaaatggggtttttttgttatttaggttggaatacggtggtaagattatagtttattgtatttttaaatttttgggtttaagggattttttttattttagttattttaattttaagtagaagtttaaatagtttatagttttaaattttgtgatttgtggagtgtggtggtgtatttgtagttttagttattggggaggttgaggtaggaggattgtttgagtttaggagtttgagtttagtttgggttatatagcgagattttattttttttttttttttttttatatatatatatatatatatatatatatatatatatatatatagttatggttttaatacgggtttttaatattgtgttttttaaaatttttgttttatcgatttttgttttttttttgttgacgtttttttgttttcgtattttgagttttttttttattagattttggtaggttgtttttattagtttcggacgggtatagagaggatttatagtggttgagatttattttcgttttatagttataatttttattttttgtttaggttaaagttttggttaatagaattgcggagggggtgggtggggatagaaagggtaatgacgttttttaaggttacgttatagggaatttttttttaagtgatagggaatttttattttgagaattcgttttcgatagaggttgggttgggggttgtggaggggttggaggtgttgggtgtttattgggaatggagttagagtttgtaggagataagggcgaagtttttagtgagggttattatggggatttgttgattttatttacgtttttgtttttatttttttgaaattgatacgttttgaagttttttatttttcgtaagtttataatagggtgttattttttgatatttttttcgatttttttatttttttttttttattaggtgttattttttttatttattgatttttgggaggtagtggggtgggtttttttttggttatattggggaaggatttagatagggatataggtgagattttatttattggagaagtatgaatttttttttttttttttgttttatttttaagagatttcgttgtgttgtttaggttggtttcgaatttttgggtttaagttattattttattttagttttttgagtagttgggattataggtattcgttataattatatttggtttttatgaatattttaattttggtttttgtttttatagataagtttggggtataggttgtgggttttttttaagaggttgtttttggattcgaggaattaggttttggtgagcggatttaggttttttaggtggtcgttatagtaggtttgtatgaagtttcggaaggtgttcgggtttttataggagagaggatattatagtggaggttttagttttttttaggtgttttttgttttatttattcgtttttttttgtgatttaggagtttttgtttttagttttaattttttattttttttagatttaggggttatagttttatttttattttttttttttttttgagatttaggggtttaggttttagtttttttttttttagatttaggagtttttttttattatttagtttagtatatttttattagaattattgttattcgtttttggttttgtttattattgtttttagtagtttttttattttgttttttattaggttttagcgatttatttttagttttggtggggggtttagggtttttttttgggtttttggttggtatgttaggtggaattagagggtaatttgggtaggttgggattttagaatttttttttttttttttttttatgtttattttgtgtcgttttcggtggtttaggggtagttttttgttagtttttttgttttttgtttttatttttatgtgttttttgatcgttaatttttttttaattattagttattttttttttttttttttttttttttttttttatgagatagagttagttttttgttttgttgtttagggtggagtgtagtgttatgatttcgttttattgtaatttttattttttggatttaggtaatttttttgttttagtttttcgagtagtagggattataggtatttgttattatgttcggttaatttttgtatttttagaagagatggggttttgttatgttggggtttcgaatttttgattttaagtgatttatttatttcgggtttttaaaatgttgggattatagatgtgagttatttcgttcggttgggttatttttttattttgtgttagtagttttttttgttattttgtttgtttgtggtttttttttaatggtttttttaattgttattttttgatgtttttttttattatttgattttgttgtttaggaattattttttttttttttcgtttttttgtgatttttattttgtttgagttatttttgtggatagtggagggagagtaggaggtgattttttgtttttaggggtagatattggtttagttttgttgttagttttttttttcgggttagattttttatttacgtatttggataaagtttcgtttatagagattagtcgttacgcgggggttatatgtagttagttgtgtgttttggtcggtgatttattttgtttttttaggattgtttttttttttgtagaacggggtaataatatttattttagggttatcgtgagaattaagagttattatatacgatgtatatggaatggtgttttgtatattgtttatatacgtgttaaatttttttttttttttagacggagtttcgttttgttatttaggttggaatgtagtggcgcgatttcggtttattgtaatttttgtttttcgggtttaagtgatttttcggttttagtttttcgagtagttgggattataggcgtatgttattatgtatggttaattttttgtatttttagtagagatgggtttttatttatttgttagttaggatgattttaaattttttgattttgcgatttattcgtttcggttttcgaaagtgttgggattataggtatgagttatcgtgtttggttttgtattaaaaatttaaatttttattggataatgttgatttagaatatgattttattttaatataaagtatatggtcgggcgtggtggtttatgtttgtaattttagtattttgggaggttaaggcgggcggattatttgaggttaggattttaagattagtttgggtaatatggtaaaattttgtttttattaaaaatataaaaaaattagttaggtattggttaggcgtagtggtttacgtttataattttagtattttggaaggtcgaggtaggcggattacgaggttaggatatggagattattttggttaatacggcgaaatttcgtttttagtaaaaatataaaaaattagttaggcgtggtggtgggtttttgtagttttagttattcgggaggttgaggtaggagaatggcgtgaattcgggaggcggacgttgtagtgagttaagattacgttattgtattttagtttgggtaatagagcgagatttcgttttaaaaaaaaaaaatagttaggtatggtggcgtgtgtttgtagttttaaatattttgaagattgaggtaggagaattttttgaaacgggtaggcggatgatgtagtgagttaagatcgtattattgttattattgtattttagtttgggtgatagagtgagatttcgttttaaaaaaaaaaaaaaaaatgtatatgtaaaatatagacgtatatattagtatatatttatttttttatatatgtttatatatttaaatattttgtatatatatattttatagagagataggtgtatataaatatatatatgtatatagatatgtatttttttattacgattgtatatttttatttttacgtacgtacgtgtatatatatagatgattttagtttgtattaatgtgatatttatattttatttttagttatcgatatatatatttttcgatacgtatatgtatacgtacgttatgaaacgtatatatttcgtatttatgttttacgtggttatagagttataggatatatagttatatttatatttattaggtgtgggttttatatttttttatttatttttttttatttttaatgtaggttaggattagtacgtagaggtatagggtaggtagggtttggagtttgtttttgaggagggatatttttgggggtttcgtgtttttgtttttttgtgtttaattttgcgggtcgggggaggggaggttgtatagagtagggttttttttcggttattttttcgtttggtagagattttagagagtagggtttaggtgatagtggtaattagaggttatgtttttgtgggttttttttttttttatttttttatatagtgttttgagagaagatagaggtttttgagttttttgtattgaggtaggtttaaattttgtttttattttttatgatagttttatttgttggttttagtttttttttttataaagtgggaggtatagtatatattttagtatattatttgaataaatataaagaaaggcgtagtggtttacgtttgtaattttagtattttgggaggtcgaggtgggtagattatatgaggttaggagtttgagattaatttggttaatatggtgaaaaattttgtttttattaaaaatataaaaattagttagaagtagtgatgcgtgtttgtaattttagttatttgggaggttgaggtaggagaatggtttgaattcgggaagtgaaggttgtagtgagtcgcgattatattattgtattttagtttgggtgatagagtaagattttgttttgaaataaaataaaataaaaaatgaagaaagtttttatcgtggagattggtaatataggtgtttaaagattattgttgttggttaggcgcggtggtttatgtttgtaattttaatattttgggaggtcgaggtaggcggattacgaggttaggagattgagattattttggttaatacggtgaaattttatttttattaaaaatatgaaaaattagttaggcgtggtggtaggcgtttgtagttttagttattcgggaggttgaggtaggagaatggcgtgaatttgggaggtggagtttgtattgagtcgagatcgcgttattgtagtttagtttgggcgaaagagtaagatttcgttttagaaaaaaaaaaaagattattgttgttattattattttgtgtttaattttttttagttattgggttgtagggttaggtttgtggtagggttttaatagggtttaagggttgatgagaggaaatagtaatatagttttatgtttttagtttttgtttttttttaggtgggttcgagttcgattatttttaagtattttttgagtttttaattttaatttttttttttttgggtgattttggttttagat

SEQ ID NO: 137 - DNA, 12423 bp, Artificial Sequence
  chemically treated genomic DNA (Homo sapiens)
tttatttgagttttttttgttgtagagaaagtttttttgtgattttatttttttttttaaatgttgggaaatgtttttgagttttgtttttgatatatatattttttttgggttgagggatggggattgggatatatgttttgggaagggtaggtgtagagtgatggggttgacggggtgggggaagtagggggaggagttgtttttttgaggtttttgggaatcggttgtgttaggtatttttagttttttagttaagtaatatagagagttaaaagaggttattagagataagaaggtttttatggggttattgtttgtgggggatgttagtagtggggaggagtgaagtaggaaggaatcgggagattggatggaattgttttttttatacggttatatatagttatatatggttattgggattagagttagttttgtttgggtagttaggtttttagtgtaagttattagtttatttggaggggattagtgtttcggttaataaggttagttggtttttttttagttggagtttatttaattttgttaggaagttagagagttggataagtggagtttagtttggggaggtggaagagagggaggatggagtatggtgaagtataggtggtttttttggtagttttagttttggttttggaatagtttgggtagtgtgttaattttttttgttattgtcgttttattgatttttatgaatgagttgcgaggtagttatttttagttttttatggataaatattcgaggtttagagagggtaagagatttgtttgcgattttttagtatttttgtttttttttggggttttgagggtataataaagatttttaaggtttttttttttcgtaggaggtttaggcgtagttgtgggggagggtgtttttggtgttttttgtttttgtagttagtttgttttttattcggtagttttttttttttttttgggatgagatgtgtacgcgatgatgggattttgtaaatgggttgggaagaaggagttatttttttaaagggttagtttttttaggagtgttcgaatttttaaagggggtagggttttatataaattttatttagaagtaggattataagagtttttgtagtatttttttttttttgttggttttttttgagtgtgtattttgttttattagcggaatatttgcgggttagggttattggagatagggttatatcgtttgggcggttatttaagtaattttattattttgagtattttttttttttatttgaaaggtggggggttatttatttagtttttagggttgttaaggtgattaaatgggataatggttgtattatttttgagtaaagggtattatagatgggaagattattttagtttcgtagggagttagatgggttgtgagggaggggtaaaggtagggttggagggggttggaggggttggttgagtagggtatatatggggggggtttttttttaaatttagaaaaatttttagttaggtttagtgtttttgttgagaaattgaggtttaaagaaaggaattttttgtttttttgtttttttttttttgtttgaggttatttatttatttaataattttgtgttcgatattagataaggttttagtgagtaaaatgaatatagtttttttgggaatatagagtttagatagggagatgattattttattattgtaaatataaatatataattttagtttgggttaagtgttgtgaagttttagatttgtgtttggttcggtgttgtattttaagtattttggtatttaagtggtattgaaatatttgttggaaagaaggttattttgaggaggtgatgttagagttgaggtttggagggttggagttaaataaagatggttttaggttttttttgttttttttgtaggttttgtttttgttttttttttggtatttaggttaagggtaagtattttcgattggttattagttttaatatgtcgagtatagggattagattttgttttgcgtggtcggttttttttaggttttgaatttagggaagtgtatgtggattttaatttatttagatggtgcgtttgtgtttgtttttttttcgggtatgttttagaatagagtttagtttagagtttaggggtggtcgggatgatggatgagggtgtggggtttgttgattattaggggatttgattattgggttgggttagtttttttgtttttatttttttttttgtaaagaaggggtgttgggcgtttttatttttcgcgttagtttcggggtttttattttggcgggaagggtaggtcgattcggtagattgcggtttttcgggagggaagaaggtgttagacgcgcggagtaattataaatagttttttttttttagaagacggtacggggtttaagatttaggcgtcgtatatttagaatgagagtagagattttcgttaggaaaaaaaggtatttaggggatttgtttattagtatgaaatgtaaatgagttcgttcggttttatttatataattttgtgtatggattcggcgaaagggtaattagggagacgacggcgtagtagttattttgttattttttttattttttttttttatcggtcggggcgggaattgagacgattttaattttttgcggtggcgggaggtgcgcgggggttgcgtgggtggtgtagttttaggagagtgaataacgtttaggggtgatggttttagtaaagtgaggggtggtgatggaggttattcgatttatttcgtcgttttttcgtagtggcgtaagcgttttaaaattttcggagagggaattgattgatttattaggtttcgtcgtgtttatttttcgtagatgttggggaagtgtttttcggcgtttaattttcgttgtttttttttttatcggcgtttagtatattcgcggcgtttcgttttcgggtatttatagttttttggagtggcgtcggcggtaggagagagttagagtcgattgagttttagaattcggggaggtaggcggggtaagggtcggggtttgcgcgtgcgtgtgtacgcgtggaaagtataaatttacgagggttcgttgtcggtagggttaaggtgagtgagtgaaggcggtagattcgcgaagttttagtttcgcggatattttttttttaagttatatagggatttaagagaaattgaggtacgaagttggggggtggcggtggtggggattttgaaggtcgagtcgataaagtttagttttgtgttttcgtttttttttatatattcgagatttttataggtttttttttaggggttttcgttttgtttcgtagttttttttggggattcgggttttgcggtttagcgcgatttgtttggggttacgtgtttaagtacgaagtttttgcgtggagtttacgttttttaaaaggtttttaggggtaaagggatgaagtttaggagcgttaatgtgaggttaggtttagcgggttagggttacgaggttagggtcgaagttttagaattgattcgggagtatgattaataagtttaagagatttgtggaggttacgtttagattatgtttattttagtttttttcgagtttcgttcgtttttttaagattgggtttttttagtttgaagttttatttttaggatatttagtttcgtttttttttttttttagtttcgtagttaagtttaattttagggtgggagattaattaggtggagatttgggatttcgttttgggattttttggtgataatttttattttcgtgtcgtttgtttttttttttttttaggttcgtttagagttgagtttcgtttttcggttgttgtttaaattaggggtcgtggataaaggatgtttggggtttgcggttttacgttaggatttcgcgtcgaatattttgatttttcgggttttttttaagggagttttaaagattttaatggttaataggaaagtgggttcggtttgggtagtagtttgattggttttagttttcgggagcggatttaggggtaaggggaggggagaggggcggttttgggttttggggtgggaatcggattttagttgtggttttttttttgcgttttcgttcgtattgttacggcggacggttaatgggcgcgcggttcggggtcggcggcgttcggcgattggttgcggggttgtttgggggcggggtcgaggtttgaagttgaagtgagggatttagttgtggtgtgcgcggggtttttcgtcgtcgttttcgttcgttcgtttcgcgtttcggtcggaggaggaggttgtggcgtcggcgatagttacggtagcggtagttatcgcggcggttgcggcggcggtattttcgtttttattttcgttcgggattgttttttattgttttttcgtttttttcggatagtgagttcgcggcggggcgggggaaggagtcgtttttattttttttaagtttatttttaaagagatttttttttttttttttcgtcgtttggcgcggagtcgggacgatgttgattttttagattcggttttagttgcgtcgcgggaagagggggcgttttttttcggattttcgtttttcgtcgttgttttttttttcgttcgttttttcggggcggtttcgtcgaaggtagcgtcgaattcggtaatcggagtttgggcgcgaagcgaagaagtcggaataaagtgagggggagtcggtcggttggttcgggaagttttaggggcgtaggggaagcgggattcgcgtcgggcggggtttttttgcgtttcggcgtttcgcgggtagtatgtttttgcgggtagggggagttgggttgaattggttttttcgggggtttagtttgcgttttagagtttattagatgtgttttcgtcggggttttcgggttgcgtgaggatattttttttgaggggcgtcgtttgttttttttcggatcgttcggggtttcggttggttagaggatggacgaggaggaggatggagcgggcgtcgaggagtcgggatagtttcggagttttatgcggtttaacgatttgtcgggggtcgggggcggtcggggtcggggttagtagaaaaggattcgggtagcgcggatttcgaggcggaggggttgtcgtattcggcgttggtttcggtggtttttttttatttgagttaggatagtcgttcgcggagttggtgttttcgtacggtttgtaatttatatttttcggggtacgacggttaggcgcggggttagaagggggacgggtcgtatcgtcgggggtcgggggggaagaagatttatcgttaggtgagtcgaagtgagttcggagggtaggcggatggggggggggttgttagggaggggagggggtattagagtgggagcggagacgcgagtaggtttcgtcggtaattcgggtttattttatttgcgtatatatattttagtttttttgggttgggggggtggggatttaggttaggagaagagagttgtgtttcgttggttcgtagttggacgttttttagatgtggttaggggagggtcgttattttttagatgtgggaagtttcgggagtttgggagttgtattttgttcgcgtcggttagcgagttgggtttggttttcgagtttggtggggggtgggtgggggcggtggggaggaagttgcggggacggaggaggggggatcgtaattttttgggtttttttttttttttcgttttaaagtttgcggcggattttagggtttgattttttaatttggtttttgaggttgaggtttttattgatttagaaggagatgttggggggcggggattaggttttggtttattttattttttatttcgcgggttggaggtataataaggagatttcggcggcggttgatgttaggggcgtagaatgagaataagatgtggtggaggggagttgtttgttttcggagttgggagtggagttttttttcgttagagtttagtgtcgcgggtgttttttattcgatttttattcgatgtagggtgtttaagattgggttggggagttttatgttggattttttttgtggagggaaagattgtgttaagagtttttttagtaagtgggggatggggttaagttggtttaggttatttttttttttttataaataaagagtgtttttgtagattaggtatgggggattgtaggttcgcgaaagttttgaggggatagtaatattgttagtgtgtttattaaggaggattcgggtttattattttagcgtagatttcgtagataggtttggggaatgtaagttttatattttagggagatggatttagtattgttttttgtttgtttaggttggagtggtaggggagattttagtttagttagattttagtttaaagcgttatttgatagacgtttggttttaagttttttggcgggttttgttatcgggggaaggaaaggtggaggggaggtgttgttgttattttaggtttggatagtttttttgggttttttttttttagtttagaggtttttatagatttagggtgggagattttaggttttttttgtagtttttgtgagtttagtagggattttgttttggggaaggggggtggaaggttggtgtcgtttttattttttgtagttttgttgtttttagtgcgtaaagtagggatgagtttgtggtttttttatttttattttttatattttgtgggtttttaggaagttttttttattatattttttttttatttattgttttttttttttttttttttgagttgtagaaagagaggtgtaggttttagaggtttgtgtttttgttgaataggtataattttgaggtttgagtttttagttttaggttttttttttttaggtagggatggagatggagaattgatatggttggaaaggatgggtttcgagtaatttttttttttgtttttaattatttattttttttacgaatgggaaaaagtattaatttttatgtttttttttttaagggttttaggggaggtagagagagttttttttttttttttttttgaaaatagatttttaggttagtattttttttcgtttgttttatttttaggtgttagtggagggtttggaggtagatttttttattgagtggtttggacgggggtaagtgttgaggtttggtatgggggaggagaggtgggaggatagtatttattttgggagttggggagtagttttttttaggggagtggtagttgggtgtgtggtattagtattattaggtttggagaagtttgggttggttgaggatgggttgagaataattttttggtaggggattgtttaagttgtgttttttattattgttattttatttaagtattaagagatatttgtatttttgttgttagaggggttttgaattgtttttagggtttttttttttttttttgtggtatttgtgattttttataggttttaggagggtttttgtacgtttttgagtcggagggatataaggatatttttttttatttttaattaattgaagttagttaggttttttttggtatattttgttttttggttttttttttttaagggattaggttttttagagaggagatttagatttaggtaggaagtgtgtgtgtgtgtgtgtgtgtgtgtgtgtgtgtgtgtgtgtgtgtgtgttgtaagggaggatagtaaaaggtttagaagtgtaagttttggtgtggagagtaggggtattggtagatagttatttttgttttagattagaggggagtatgttggtttttttagtatgtgtttttgtaagtgtgagggagcgcgtttttttttcggggaggagttttttcgtattttttttttggttgttgtgttatatttggaagtttgtgtaggagtttttttaagtttagagtttagtatagtttttttttatttggaaattataggttggtatttgggatgtcgagagagggggagtgggaggggggttagagggggaagaggggagtttgttaggagtcgggggaggagaggggggggaggtttgaacggtaggagttttaatggtttttagaagtgagtgtgagtgagtgattgtgcgttattttgtgtgtttgagtgtgtttttttagaggggtgggggtataggagtttttggagttttttttgttatattgttttaatgttttaagtttgtttattttttttatttagggagaattttttatttttgtttttagaggaaatggtggggggagtgttttttttgtttttttattaatttttttttttaatttaatttttaaattttaagtttattagaggagattttggggagaagggttggggttggagaattgaatgggattgagggggggttagattattttttggtatgttttttgttttaggtttattttttttttgggttatatatatatttttttttattcgttttgttttatcgttttgttgggggattttttattattcgtagtgttagttggagttatttttgggattatttttattatatagttttttttattttcgtttgttttcgtttagtatttatttcgttttgtttgttttagttaggatggcgatagatataattgtttatacgtagatatgcgtacgcgcgcgtatatatatacgtatatatatatatagagttatagacgtttgaattagatttttggtttatttttttttttaaagattttagcgggtcgttttttttgtgtttttgtgttttatgtttttgtttttgggtggagtcggttgtttttttgtgagttttagtttttaatttagttggaagtttttttttttttatatttatgtattgaagcgtggtgaggggggaattatagggaaataggtttgtggggtgaggggggggggttttgttgggggaatttttttttgagttttggagtagggcggagtttttatattttatgttattttaggggttgtcgaattcgatagatattaggagtttttttgtgggatgggtgaggtaaggatttatttttttatttttttatttattagaaggttaggatttttgggtttaggtttattttttttttaacgttttttagttttatatttttaggtttttaggtgggaatggggtcgttggagggtttgtttgtttttttagtttatgtttagagtttttgtgtttttagaggtgttttagttattttttttttttttttattttttttatttttgcggttgttaggttaagtaagggttttatttagataaagttttatatagaggatttatttgtggagataatatgttttagtttttttttttaggagggaggaaaggaggagggatggaagtggggtttttttttttgtcgttttttttttttttgtttttgatggtgggttgtggggagaagaaagattttttttttttttattttttttttgggatttattttagttcggatagttattatagtaatagtagatatgtgattgtataggttttttatagttattatggtaattagtgtttttcgtttttttggttattatggggatttgttatatggtttttttttaatttgataatttgtgggtttttttgattttttttttttgtataaggataagataatagttttagttaggggagattatgtgagaggggtttttttaattattatgataataaatttatattatttggtgatatatttttttgtcgttatggtaatagaagaatattatatagtgatatattgttatgtttttaaggaaataagttttattttgagaagggtgaaagatttttttttttattaattatttttttatttagagtgttttaaattgtcgtgtgttttggttttttttttgttcgtttatgtttacgtgtcgtggaaggagagttgtatagggtgggtaggatgttatttggaagtaggttgaattgttaagggatttttaagaaggggttgatatgattaagagttgtgtatgaggttattcgggggtaggttttgtttgtaagaggtttttagtttgagtttgggtaaggtggggatagaaagaggggtaatttttttgtgaggttatttttgtatttttttttagttataagtagtttatttttgttaagggaaataaggtaggaagatttgaatggggatatatatttggtttttaggtagggagatttattgattggttgattcgtttatttatttatttagtttttttaggtattgattatttgtttcgtgttaggtattatagtaagtttcgtaggggatttaaagacgtattagaatgtttttgtttgttaggagttttagtttagtaggggaggtcgataagtgtatagattattaatacggtggaattttgttattagaggggtttaagtagatgttttgggagttttttttttttagagatttattgtttttatatagagatatttatttattggggttttttttagatttttttttttttgtagaggagaggaggggatttgtatggggaaagtagattagtttttgagggtaattgtgtttttttttttttaaatgatggttttttttttgtttttttttttttagggtgatttttggttgaattttattttggggagagatttattgtatttcggttttatttagaaaaataattttatggaaatagagtattttttattttttttttgttatttgtttatttttaaaaatttagaattttttttttaaatttttttatttttgtgagggggtgggggttagggaaattgtagtgtattaggattttcggggtattacggataggtggcgagtaggtatgtgagtttaggggagaagggtttgggtggtggagaagagataggggagggttgttaggggtttgagggatttatgggttatgggggagggtatgtggtttgggagttagaatagagatgggttatggttgggattagttgggaggaaggtttataggtttttgaatatttttgttggtttttttatgtttggttaaagtttttttattttagaagtaagattttatttgttttgggttttatagagtttggtttggtgggttatgttaggagttgttataatattttttttatttttattttttagggggtttttggttttttttttttaattttttgttttttgattttttttagtttttttatttttttttattttttttatattttttttaaagaaaataggatatttggttatttaatcgtgagtttagtgtttggaattttttaaggttcggaggtcgttttgtatatttttttgttgatgggttggaaatgagttattttatagaatttattgtatggaaagatttagggtttagaaagaattttttttttttgtttgttgttttggttggtttgggttggaagttataagtaggtgtgatggcggtaatggttttttgggggagggggtagatattgtttattttgtacggtttgggagttatgtttagtatggtgtttgatatataatgggtttttaatatttaaatgtgtgaatatgtttagtggttatttgagggtgttgagaggttgggaggttggtggtggaagagggagtttcgggttttggtgttgtagtaggggggattgtagttgtggacgtttgttttatatttagtgttagggcggttatgataggtagttttgtttgtttgagtagttatggtgtgtagaggaaattattatatattaggagtttggaaattatcgttttattttgttttttcgggtgatttttagtatatgatttcggtatttttgggttttaattttttcgagttttggggaagaaaatgatttattttagatattttatagggttgttgtgagtattaattgtggtattgtgtgaaagtgtttggtaaattgtaaggtaggtataattcgattttaggtttgtataatatatttatatatagtattttatttgttttttatatttattttgtgaggtagggagaataggatttagattttgtagtaaatttatggtgtttggtatttttataggtatgatcgatttattttttaaatggtttgtgtaaatagttagggtatttgtggtttgtttttttttatagatgaggaagttgggtttagagaggtgagatgattaaggtgggattttttttttttgatgaggagtttggggttgggggttggtttgcgtgtatgttagggttttggtattatatttgtttagttttagatggagttaggaggtaaacgaggaggaggtgttagggcggggtcggggggtcggttttagttttagttttggttagttgtttttttgattgttagtatt

SEQ ID NO: 138 - DNA, 12423 bp, Artificial Sequence
  chemically treated genomic DNA (Homo sapiens)
ggtattggtagttaaggaaatagttggttaaggttggagttgaggtcggtttttcgatttcgttttaatatttttttttcgtttattttttggttttatttgaggttaagtaggtgtggtgttagggttttgatatatacgtagattagtttttagttttagattttttattagagaaggggagttttattttggttattttatttttttggatttagtttttttatttgtaaaggaagataagttataaatattttgattatttgtataagttatttggggaataaatcgattatgtttgtggaaatgttagatattatgagtttgttgtagaatttgaattttattttttttattttatagggtagatgtgagaagtaaatgagatattgtatgtgaatgtgttatataaatttaaagtcggattatgtttgttttatagtttattaagtatttttatataatgttatagttgatgtttataatagttttgtgaaatatttggggtagattatttttttttttagaattcgaggaagttgaggtttagaaatgtcgaagttatgtgttgaaggttattcgagaaggtaggatgagacggtggtttttaagtttttgatatatgatagttttttttgtatattatagttgtttaggtaggtagaattgtttgttatgatcgttttggtattaggtgtaaggtagacgtttatagttgtagttttttttgttatagtattagagttcggggtttttttttttattattagttttttaattttttaatatttttaaatgattattaggtatatttatatatttaaatattgaggatttattatgtgttaggtattatgttgggtatagtttttaagtcgtgtagagtggataatgtttatttttttttttaagaggttattgtcgttattatatttgtttgtggtttttagtttagattagttaaaatagtaagtaggagagaggggttttttttaaattttgggtttttttatatagtggattttatggagtgatttatttttagtttattagtaggagaatgtataaaacggttttcggattttagaaggttttaggtattggatttacggttaaatgattaagtattttattttttttaaggaaaatatgagaagggtggggaagagtaaagaggttagaaaagattagagagtaggagattggggaaaggagattagagattttttggggaatggggatgggggaggtattgtggtagtttttggtatgatttattaagttagattttgtagggtttagagtaggtggaattttgtttttggaatgagaaggttttggttaggtatgaagaggttagtaggaatgtttaggaatttatggattttttttttagttggttttagttatagtttatttttgttttgatttttaagttatatgtttttttttatagtttatgaattttttaaatttttgatagtttttttttgttttttttttattatttaggttttttttttttagatttatatgtttgttcgttatttgttcgtggtatttcgagagttttaatgtattgtagtttttttaatttttatttttttataagaataagagggtttaagaaaaaagttttaggtttttgggggtaggtagatgatagggaggaaataaaaagtgttttgtttttatggaattgtttttttgagtagagtcggagtgtagtggatttttttttagaatggggtttagttaggggttattttggaaaaagggggataggaagggagttattatttggaaagggaaagatatagttatttttaagaattggtttgttttttttatgtaggttttttttttttttttgtagggaaaggggggtttggaaggagttttagtgagtgaatgtttttgtgtggaggtagtagatttttgaggaagaggggtttttaggatatttgtttggatttttttaatggtagagttttatcgtgttagtaatttgtgtatttgtcgattttttttgttgagttggggtttttgataggtaggggtattttgatacgtttttagattttttacggagtttgttgtagtgtttggtacggagtagatgattaatatttgggaagattgaatgaatgaatgaacgaattaattaattaataagtttttttgtttagaagttagatgtgtgtttttatttaggtttttttgttttgttttttttgatagaggtgaattgtttataattgggggaaggtatagaagtgattttatagaggagttgtttttttttttgtttttattttatttaggtttagattggaggttttttataggtaaagtttgttttcgaataattttatgtatagtttttgattatgttagtttttttttaagggttttttggtaatttagtttgtttttaagtaatattttgtttattttgtatagttttttttttacgatacgtaagtataaacggatagggaagagattaaggtatacgataatttgggatattttgaatagaggaataattaatgggggggggggttttttattttttttagagtagggtttgtttttttgggaatatggtagtatgttattgtgtgatgtttttttgttgttataacgataggaggatgtgttattaggtggtgtggatttgttgttatggtaattaaaaagattttttttatatgattttttttgattgaggttgttgttttgtttttatgtaggggaggagaattagggagatttataggttattaggttgggggaaaattatgtgatagatttttatggtaattaagggaacgggggatattggttgttatagtgattatgagagatttgtgtagttatatgtttattgttgttatggtgattgttcgggttggagtggattttaaagagggggtaggagaggggaggattttttttttttttataatttattattaaaagtagagaaaaaggaaacggtagagagaggaattttatttttatttttttttttttttttttttttgggagagagaattagagtatgttatttttataaatgagttttttgtgtggggttttatttagatagagtttttgtttagtttggtagtcgtaagggtgaggaaagtagggagaggaggggggtggttgggatatttttaggggtataggggttttgggtatgggttgagaaggtaagtaggttttttagcggttttatttttatttaggagtttggaaatgtgagattaaggaacgttgaggagaaaatgggtttggatttaggagttttggttttttagtaaatgaggaggtagggggataggtttttgttttatttattttatagagaggtttttggtgtttatcggattcggtaatttttagggtaatatgggatgtaggggtttcgttttgttttaaagtttaaagggggatttttttagtagaattttttttttttattttataagtttatttttttgtggttttttttttattacgttttagtgtatgggtgtagggggagagaggtttttagttgaattgaaaattgaagtttatagaaaggtagtcggttttatttagagatagagatatgagatatagagatataagagagacggttcgttggaatttttggaaggggaaataggttagaaatttgatttaaacgtttgtgattttgtgtgtgtgtgtgcgtgtgtgtgtgcgcgcgcgtgcgtatgtttgcgtgtgagtagttgtgtttgtcgttattttggttgaggtaggtagggcggggtgagtgttgggcgggagtaggcgagggtggggggggttgtgtggtgggggtaattttaggaatggttttaattggtattacgggtgatggggagttttttagtagagcggtggagtagagcgggtgggaaggaatgtgtgtgtgatttagaaggaaagtgggtttggggtagaaagtatgttaaggggtgatttggtttttttttaattttatttaattttttagttttagtttttttttttagaattttttttggtgagtttagggtttggaaattaaattggaggagggaattgatgaagagataggaagaatattttttttattattttttttgaggatagaaatggagaattttttttaggtaagagaaataggtagatttggggtattgggatagtgtggtaaggaaggttttagaaatttttgtgtttttatttttttagagggatatatttagatatatagagtgacgtatagttatttatttatatttatttttggaagttattagggtttttgtcgtttaggtttttttttttttttttttttcgatttttggtaggttttttttttttttttttggttttttttttattttttttttttcggtattttaaatgttagtttgtgatttttaaatgagaaaaagttgtgttgggttttgagtttggagaaatttttatataaatttttagatgtgatataatagttagagagggaatgcggaggaattttttttcgagaggggagcgcgtttttttatatttgtaggaatatatattggaaaggttagtatgtttttttttgatttgaggtaggggtgattgtttgttagtatttttgttttttatattaaagtttgtatttttgagttttttgttgtttttttttgtaatatatatatatatatatatatatatatatatatatatatatatatatattttttatttgggtttagattttttttttaggaaatttggttttttaaaaaggagaggttaagaagtagaatgtattaagaaaagtttaattagttttagttagttgggggtggaggggagtgtttttatgttttttcggtttagaggcgtatagggatttttttgaagtttgtggggagttatagatattataaagagaaagagggaggttttggaggtagtttagagtttttttggtagtaaaaatataggtgttttttggtatttgggtaggatggtagtggtgaggggtatagtttaggtagttttttgttaaaaaattgtttttaatttatttttagttaatttaggtttttttagatttagtaatgttgatgttatatatttaattattatttttttgggggaagttgttttttaatttttaaggtgagtgttgtttttttatttttttttttttatgttaggttttaatatttgttttcgtttagattatttagtgaaggagtttgtttttagattttttattagtatttggagatagggtaggcgagaagagatgttagtttagaggtttgtttttagggagaggggagagaagagttttttttattttttttgggatttttgagaaggaggatatagaggttgatgtttttttttattcgtggaaggggtaaatgattaggggtagagaggagagttgttcggaatttattttttttagttatattagttttttatttttatttttgtttgggagaaaggggtttggggttgggggtttaaattttaagattgtgtttatttagtaagaatatagatttttgaggtttgtatttttttttttgtagtttagagagaaaggaagaaggggtagtggatgagaagaggatgtgatgaggggagttttttaaagatttataaggtgtagaggatgggggtgggggggttataagtttatttttgttttgcgtattagaggtagtagagttgtagagagtgagggcggtattaattttttattttttttttttaaagtagagtttttgttaggtttataggggttataagggagatttggggttttttattttgggtttataagaatttttgagttggaaggaaggagtttagagaagttgtttagatttgagatggtagtaatattttttttttatttttttttttttcggtggtaggattcgttagggagtttggggttaggcgtttgttaagtggcgttttgagttagggtttgattgggttggggttttttttattattttagtttgggtagatagggagtagtgttaaatttatttttttggaatgtggggtttgtattttttaaatttatttgcggagtttacgttggggtggtggattcgagttttttttagtgaatatattgatagtattattgtttttttaagattttcgcgggtttgtagttttttatatttggtttgtaggagtattttttatttgtgaaaggggaggagtaatttggattagtttaattttattttttatttgttaaaaaagtttttgatatagtttttttttttataagaaaaatttagtataaaattttttaatttaattttaagtattttgtatcgaatggagatcgggtaggaggtattcgcggtattgggttttagcggaaaggggttttatttttagtttcgggggtagatagtttttttttattatattttgtttttattttgcgtttttgatattagtcgtcgtcggaatttttttgttgtgtttttaattcgcgaggtggggggtgaggtgggttaggatttggttttcgttttttaatatttttttttaggttagtaaaaattttagttttaaggattaggttgggggattagattttagaattcgtcgtaaattttggggcgggggaaggagggaaatttaggagattgcggttttttttttttcgttttcgtagttttttttttatcgtttttatttattttttattaaattcggaaattaaatttagttcgttaatcggcgcgggtagagtatagtttttaggttttcgaagttttttatatttggaggatgacgatttttttttgattatatttggagggcgtttagttgcgagttagcggggtatagttttttttttttggtttggatttttatttttttaatttaggaagattgaggtgtgtgtacgtaggtggggtaagttcgggttatcgacgagatttgttcgcgttttcgtttttattttggtgtttttttttttttttggtagttttttttttattcgtttatttttcgggtttatttcgatttatttggcggtgggtttttttttttttcgattttcggcggtgcggttcgttttttttttgatttcgcgtttggtcgtcgtgtttcgaaggatatgggttatagatcgtgcggagatattagtttcgcgggcggttgttttggtttaagtagaagaaaattatcggggttagcgtcgggtacggtagttttttcgtttcggagttcgcgttgttcgggtttttttttgttgatttcggtttcggtcgttttcggttttcgataggtcgttgagtcgtatgaagtttcggggttgtttcgatttttcggcgttcgttttattttttttttcgtttattttttggttagtcggggtttcgggcgattcggagaggggtaagcggcgttttttagaggaggtgtttttacgtaattcgggggtttcggcgggggtatatttggtgggttttagggcgtaagttgagttttcgggagggttagtttagtttagttttttttgttcgtaggggtatgttgttcgcggggcgtcggggcgtagggaaatttcgttcggcgcgagtttcgttttttttgcgtttttggggtttttcgggttagtcggtcggtttttttttattttgtttcggttttttcgtttcgcgtttaggtttcggttgtcggattcggcgttattttcggcgaagtcgtttcgagagggcgaacgaaaaggggggtagcggcggagggcgggggttcggggaggggcgtttttttttttcgcggcgtagttggagtcggatttaaggggttagtatcgtttcggtttcgcgttaggcggcgggggaggggaggagggatttttttaggggtgggtttggagggggtgggggcggttttttttttcgtttcgtcgcgggtttattgttcgggaggggcggggagatagtggggggtagtttcgggcgggagtggaggcggagatgtcgtcgtcgtagtcgtcgcggtggttgtcgttgtcgtagttgtcgtcggcgttatagttttttttttcggtcgagacgcggagcgagcgagcgaaagcggcggcgaggagtttcgcgtatattatagttggattttttattttaattttaagtttcggtttcgtttttagatagtttcgtagttaatcgtcggacgtcgtcggtttcgagtcgcgcgtttattggtcgttcgtcgtggtagtgcgggcgggagcgtagggagagaattatagttggaattcgatttttattttaaaatttaggatcgttttttttttttttttttgtttttgggttcgttttcgaaggttggagttaattagattgttgtttagatcgaatttatttttttattggttattggggtttttgggatttttttggagggagttcgaagaattagagtattcggcgcggggttttggcgtagggtcgtaggttttaggtattttttgtttacgatttttgatttgggtagtagtcggaggacggagtttagttttgggcgggtttggggaagaaaggagataggcggtacgggggtgagggttgttattagggggttttagagcgaaattttaggtttttatttggttaattttttattttggagttgagtttggttgcgggattggggaagggaaggagcggagttggatgttttgggggtggggttttaggttggaggggtttagttttggagaaacgggcggagttcgagaaaggttagggtaggtatggtttgggcgtggtttttataaattttttgggtttattggttatattttcgagttaattttgagatttcgattttgatttcgtaattttaattcgttggatttgattttatattgacgtttttgggttttatttttttgtttttagggattttttgaagggcgtggattttacgtaggggtttcgtgtttgaatacgtggttttaggtaggtcgcgttggatcgtagagttcggatttttaggaggggttgcggagtagagcgaggatttttaagaaggaatttgtgggggtttcgagtgtgtgggagggggcggaagtatagagttgggttttatcgattcgatttttaaagtttttattatcgttattttttaatttcgtgttttagttttttttaagtttttatgtggtttagggaaggagtgttcgcggaattggaatttcgcgggtttgtcgtttttatttatttattttaattttatcggtagcgggttttcgtgggtttgtgttttttacgcgtgtatacgtacgcgtagatttcggtttttgtttcgtttattttttcgagttttggggtttagtcggttttagtttttttttgtcgtcggcgttattttagaaagttgtgggtattcgggagcggagcgtcgcgggtgtgttgggcgtcggtggaggggggaatagcgaggattagacgtcgggaagtatttttttaatatttgcgagaggtagatacggcggaatttagtgggttagttagtttttttttcggagattttggggcgtttgcgttattgcggagaggcggcgggatgggtcggatgatttttattattattttttattttgttgaggttattatttttgggcgttgtttatttttttaaggttgtattatttacgtagttttcgcgtatttttcgttatcgtagagggttggggtcgttttagttttcgtttcggtcgatggggggaggggatgggggaagtggtagagtggttgttgcgtcgtcgtttttttggttgttttttcgtcgaatttatgtatagagttgtgtaaatgaggtcgggcgggtttatttgtattttatgttaatgagtagattttttaagtgttttttttttttggcgggagtttttgtttttattttgagtatgcggcgtttgagttttgaatttcgtgtcgttttttgggaaaggggggttatttatggttgtttcgcgcgtttgatatttttttttttttcgagaggtcgtagtttgtcgggtcggtttgtttttttcgttaggatagaggtttcggggttggcgcgagaagtagggacgtttaatattttttttttgtagaggggaaaatgaggatagagaggttggtttagtttaatgattaggttttttggtggttagtaggttttatatttttatttattatttcggttatttttgggttttggattgaattttgttttagaatatgttcgaaaggagggtaggtataaacgtattatttagataaattgagatttatatgtatttttttgggtttaggatttaggggagatcggttacgtaagataggatttgatttttgtattcggtatgttggggttgatggttagtcggagatgtttatttttagtttgagtgttagagaggaggtagaggtagaatttatagggaaggtaaagaagatttgaaattatttttatttaattttagttttttaagttttagttttgatattatttttttagagtggttttttttttagtaagtattttaatgttatttaagtgttaaggtgtttaggatatagtatcgagttagatataagtttggaattttatagtatttagtttaggttgggattatatgtttgtgtttgtagtaatgaaatgattatttttttatttaggttttgtgtttttagaggggttatgtttattttgtttattagggttttgtttagtgtcgggtataaagttgttaggtgaatgaatgattttaggtagggaaagggaaataaagggataagaaatttttttttttgggttttagttttttaataaagatattaagtttaattaagagtttttttgggtttgaggaagaattttttttatatatattttgtttagttagtttttttagttttttttagttttgtttttattttttttttatagtttatttggttttttgcggagttaagataatttttttatttgtgatattttttgtttagggatgatataattattattttatttagttattttaatagttttgagagttgggtggatggttttttattttttagataaggaaggggggtgtttagaatgatgaagttatttaagtgatcgtttagacggtatggttttgtttttagtgattttggttcgtaggtgtttcgttggtagaatagggtgtatatttaagagggattagtaaaggggaagggatgttgtaggaatttttataattttgtttttgagtgagatttatgtgggattttgttttttttagaaattcgagtatttttgggagaattaattttttaaggaggtaattttttttttttaatttatttatagaattttattatcgcgtgtatattttattttaggagggagagaggagttgtcgagtagaaagtagattggttgtagggatagaagatattaagggtatttttttttatagttgcgtttggattttttgcgagaagaggaagttttaggggtttttattgtatttttaagattttagagagaaatagaagtgttgaggggtcgtaggtaggttttttattttttttgggtttcgaatatttatttataggaggttgaaggtaattgtttcgtaatttatttatgagggttaatgggacgatagtggtaagaggggttggtatattgtttagattgttttaaagttagggttggggttgttaaaaaggttatttgtgttttattatgttttatttttttttttttttatttttttaggttgggttttatttgtttagttttttgattttttggtaaggttgagtaggttttagttaggaaggggttagttgattttgttggtcggagtattaattttttttagatgggttggtggtttgtattgagggtttggttgtttagatagagttgattttggttttagtgattatgtgtggttatgtgtgatcgtgtgaagggagtaattttatttagtttttcggtttttttttgttttatttttttttattgttgatattttttataagtagtggttttatgaaggtttttttgtttttagtagttttttttggttttttgtgttgtttagttggagggttgaggatgtttggtatagtcgatttttaaaggttttagagggatagtttttttttttgttttttttatttcgttagttttattattttgtatttgttttttttaaagtatgtgttttagtttttattttttaatttaaggaagatgtatgtgttaaggataggatttaggagtattttttaatatttaggggaaaggatgaggttataggaaggttttttttgtagtaagaaggatttagataga

SEQ ID NO: 139 - DNA, 3720 bp, Artificial Sequence
  chemically treated genomic DNA (Homo sapiens)
tgtagttgtttattaaaattttatatatattttggtatataattatattcgttggaatttattttatagatatatttatatttatatagttaaggatgttgattttaataatattggtataagtaaaaagttggaaattgtttatatgtttatggataggggataaatcgattaatttaaggtttttttttataatggagtattatatagttttgaaaaagaatgataagatttttatgttaggatatggtataatttttaagttattttaagtgaaaaaataataataataataatattgtagaataatgtgtatggttggatatatataaatttttttgaaagaatatttaagaaatttaaatgtggttattttaggagttaggaatgaggtaggtggagaggagggatttttattttttaatttagaatatattttgttgtgttagttgattttttttttattgttaataagtattatagttttttttaatttaaattattttttttagtataaatttaaaaaaaaaaaatttaaaatggaaaaatatataggcgtgagtaaaagaaatgaatggtaataatttttgtggtttattgagtgcgtttggatatttatgtgtttttagtttttttttataggaaatgtataggtgagaaattgacgttaagggggattgagtgttaagttagttagtggtagagggtagatttaaatttaatacggtttttttttgttgtttttcggtttttgtttttaggtgggaagcgtatttatcggacggtcggttcggtgaggcgtagcgttttagattggcgtattcgcggttttagcgttttacgtttggggagcgcgcgcgtacgtagcggcgcgagtttggcggcggcggcgataataataacgttatagttcgagttttttttttcggagttttcggtatatattttgtgtttatgtttgggtatttacgttacggcggtagggtcggggttttttaaaatggtagtggttcggggagtcggaagttcggagttagcgtcgtcgtagttatataagtgggggggttgtgggttgggggagttcggtagcgttttggagaggcgaggagtcgtcgttcgaggtcggtgcgggcgagcgagggcgtcgcggtttttcgattttttttttagaggtgagtgttcgaagttaggagttcggcgtttataggtttgtgcgttgcggggaatttttatcgttagttttttcgttattcgcgcgtttttaagtttagcgggcgaggtttcgggcgttttatagtcggcgtcgcgttatgttttattttagcgagtttttcgaattcgacgcgtttttcgttaagtttattgaaggttgttgcgtcgaatttagcgttgaattgtttcggttgtttgttagggacgttttcgcggttatcggttattttggaggtaaggagggcgagtaggggtgtttagacgacgacggcgtagcgcgggggcgtattatatttgagaattaggagggattgggatattggagttatgagaataggggcgatgggaagtttaggagttttggggtgcgtatttttatttttatttatattgggtcgttagcgttttcgtaggaatttgtgcggttatcggagcgtttttttgtttgtgtacgtgtgttttgcgtgtgtatgtttttatgtgttttttgggacgtatgcgggtttttgttgaattagaatgtgtaaaaggtattttgtgtatattcgtgggtattaagagttttgtaggtaggggttgtggatttaggtgtattttttgatgtgtttagagttgatttttgttttttttttagtaggcgattttttgagttgggttttgaatagttgcggcgtaagtggggatttagtcgatttttgttttttggaggggtttgcgtttatattttttttcggttttagttatagcggtagtttttttatttaggtagtgttcgaatattcgtacgattcggaggtattttttaattttatgtcgggcgttttaggtttggtattttttttcggtttagaggtagtagcgtttagattttcgttggatgtttttttttttgcggggttcgatgttttgttgtcgggttcgtcggatttttatttttcggatttgggcgttgttttttttttagaggcgttttgggaggtttcgttttgcgcgggtgttttttcgtagtgtttgtatgagttttagtttttttcgttcgacgttaagttcggttttcggcggtttttcgtttcgttagcgttggacgttgtttttgtttttaagggtttttacgcgttttgggagttgttttttgtgggggttttagggaattgtgggttatagggagattattaggtcgtttcggaggttcgttttttcgtaatagggattaagattgaggatttgttgtttattagttgttttgcggaattgtcggtcgttttagttaatagattttattttagcggggtttatgacgttttttcgttggtttcgggtgatttaggggagggggttgagggtttttttgggtttttgattttttttagtggggagggagggagtagcggcgacggcggagagtttttggttagtacgtagttttagtttttttcgttgggttttcgtagcgtcgtcgcggcggatttttttaaatttttggtggcggatatttttggaagtagtggcgtggttgtattattcgtgtcgtcgtcgtcgtttattttttttttttaggttaaggcgcgacgtaaggggcgtcgcggcggtaaatgtagtacgcgttgtttttgttcgcggtcgtacgttaaggttttcgtttgttcggtggagagttgtgtgcggagttttgcgcgtttcgacgagtttaatcgttatttgcgtatttatacgggttataaatttttttagtgtcgtatttgttttcgtaattttagtcgtagcgattattttattagttacgtgcgtatttatatcggcgagaagttttttgtttgcgacgtgtgcggtcgtcgtttcgcgcgtagcgatgagaagaaacggtatagtaaggtgtattttaagtagaaggcgcgcgtcgaggagcggtttaagggtttcggtttttattcgttgggtttttttttcgtttttttttgagtaagagatgggtttatgggttggggcgtcgtcgttcggcgcgtacgagtttcgggtcgttttttttttcgttttttttttaattttttttcgtacgttcgagggtcggttttcgtttcgtttttagtttttttgaagcgttcgtcgtatacgttttatttagtattagttcgtcggatagttttcgcggtttaggcgttgttatttttgttagtcgcgttttgggggaagttttttgagattatttagtgaataggtattattttgggatttaagatagttttttgtaattgtatacgttttacgtttttttttataatttttagagataggttggggtaggttaaggcggtttcgcgcgggattttgtatagtagtgttttatttagtagtcgattggatgtaacgttttgttttgggttttttttttttttgttgttgttaatttttgtaaagtagacgttatttttaagtagttgataaaattgtttatttttgtaattaaaattattgtgttaaaagtttattgaatttgttatgtaagttttt

SEQ ID NO: 140 - DNA, 3720 bp, Artificial Sequence
  chemically treated genomic DNA (Homo sapiens)
aggagtttatatggtagatttagtaagtttttagtataataattttaattgtaaaaataaatagttttgttaattgtttgagagtagcgtttgttttataaaaattaataataataaaaggaaaaaaaatttaaagtaaaacgttatatttaatcggttgttggataagatattgttgtataaagtttcgcgcgagatcgttttggtttgttttagtttgtttttgggggttatagaggaaggcgtggggcgtgtgtagttataaaagattgttttgaattttagggtagtgtttatttattgggtggttttagaagattttttttaaagcgcggttgataagggtgatagcgtttggatcgcgggaattgttcggcgagttggtgttgaatagggcgtgtgcggcgggcgttttaaggaaattggaagcgggacggaggtcggttttcgggcgtgcgaggaggagttggaagaagagcggggaggggaacggttcggaattcgtgcgcgtcgaacggcggcgttttaatttataaatttattttttgtttagagagaagcgaaggagaggtttagcgagtaaaagtcgaggtttttgagtcgtttttcggcgcgcgttttttgtttgaggtgtattttgttgtgtcgtttttttttatcgttgcgcgcgaagcggcggtcgtatacgtcgtaagtaaaaggtttttcgtcggtgtgggtgcgtacgtggttggtgaggtggtcgttgcggttgaagttgcggaggtagatgcggtattggaagggtttgtggttcgtgtggatgcgtaggtggcgattgagttcgtcggagcgcgtaaagtttcgtatataattttttatcgggtaagcgaaggttttggcgtgcggtcgcgggtagaagtagcgcgtgttgtatttgtcgtcgcggcgttttttgcgtcgcgttttggtttgggggaaaggggtgggcggcggcggcggtacgggtggtgtagttacgttattgtttttagggatgttcgttattagaggtttagggaagttcgtcgcggcggcgttgcgaaggtttagcggggaaagttgaggttgcgtattggttagaaatttttcgtcgtcgtcgttattttttttttttttattaggaggggttaggagtttagggaggtttttagtttttttttttaagttattcggggttagcgggaaagcgttataggtttcgttgggatagagtttgttggttgggacggtcggtagtttcgtagggtagttgatggatagtaagtttttaattttggtttttattacgggaaaacgagttttcggggcggtttggtagtttttttgtgatttatagttttttggggtttttatagaaagtagtttttagggcgcgtagggatttttgaaggtagagatagcgtttagcgttggcgaggcgggaggtcgtcggaggtcgggtttgacgtcgggcggggagagttgaggtttatataggtattgcgagggggtattcgcgtaaggcgaggttttttagaacgtttttgggaaaggggtagcgtttagattcggggagtaaaggttcggcggattcggtagtaaggtatcggatttcgtaggaaaaggggtatttagcggggatttggacgttgttgtttttggatcggggaagggtgttaggtttaagacgttcgatatgaggttgaagagtgttttcgggtcgtgcgggtgttcgggtattgtttgaatgaagaagttatcgttgtagttgaggtcgggagggggtgtgggcgtaggtttttttaggaagtaggagtcggttaagtttttatttgcgtcgtagttgtttaaagtttagtttaagaagtcgtttgttgaggagggagtaggaattagttttgggtatattaaagggtgtatttgagtttatagtttttatttataaaatttttggtgtttacggatatatataaagtgttttttgtatattttgatttagtaggggttcgtatacgttttaaggagtatatagaaatatgtatacgtaaaatatacgtgtataggtaaaagggcgtttcgataatcgtataggtttttgcggaggcgttggcggtttagtgtgggtgggaatgggggtgcgtattttaggatttttaagttttttatcgtttttatttttatagttttaatgttttagttttttttggtttttaggtatggtgcgttttcgcgttgcgtcgtcgtcgtttgagtatttttgttcgttttttttatttttagggtagtcggtggtcgcgggagcgtttttggtaggtagtcggggtaatttagcgttgggttcggcgtaatagtttttagtggatttgacgaggagcgcgtcgggttcggaaaattcgttaaggtggagtatggcgcggcgtcggttgtggggcgttcggggtttcgttcgttgggtttgggggcgcgcgggtggcggggaggttggcggtaggggtttttcgtagcgtatagatttatgggcgtcgggtttttggtttcgggtatttatttttgggaaaggagtcggggagtcgcggcgttttcgttcgttcgtatcggtttcgggcggcggtttttcgtttttttaaagcgttgtcgggtttttttagtttatagtttttttatttatatagttgcggcggcgttggtttcgggttttcgatttttcgggttattgttattttgggaggtttcggttttgtcgtcgtgacgtaaatgtttaaatatggatataggatgtgtgtcggggatttcgaaaaggaaagttcgagttgtgacgttgttgttgtcgtcgtcgtcgttaggttcgcgtcgttgcgtgcgcgcgcgttttttaggcgtggagcgttggggtcgcggatgcgttagtttggggcgttgcgttttatcgggtcgatcgttcggtagatgcgttttttatttggaggtagaggtcgaggggtagtaggggaggatcgtgttgggtttgaatttgttttttgttattaattagtttgatatttagttttttttaacgttagttttttatttgtgtattttttgtggagagaaattgagagtatataaatgtttaggcgtatttagtaaattatagagattattgttatttattttttttgtttacgtttgtgtgtttttttattttaagttttttttttttaaatttgtgttaggaaaaataatttaaattaaaaaggattgtaatatttgttaatagtaggaggaaagttaattagtataatagggtatattttaaattgaaaagtaaaagttttttttttttatttattttatttttagtttttgaggtagttatatttaagttttttgggtatttttttagaagaatttatgtatatttaattatatatattgttttgtaatattattattattattatttttttatttgaaataatttagagattgtgttatgttttgatataaagattttgttatttttttttaaggttgtatagtattttattgtaagggaggattttgagttagtcgatttattttttatttatgagtatgtaggtagtttttaattttttatttatattaatgttgttggagttaatatttttgattatataaatgtgaatgtgtttgtgagataaattttaacgagtgtaattgtgtgttaaagtatatgtaaaattttgatagataattgta

SEQ ID NO: 141 - DNA, 8759 bp, Artificial Sequence
  chemically treated genomic DNA (Homo sapiens)
tagtttggaagagggtagttaggggagaagttagggttggagttatgagaaaggataagatgagatgatggttttaatattgaggatagaaagaatattgagatgagaaagtagtttattataagtatttatgtaaaggaaatagtagatgtttataaattagtagaggtaataattttgaaagtttatttataagtttttttttttatttttaatttagtttaaatgtaattatttaaattgttttttatttttttttttggattatgaatgagttttttaaatgtagggtttatagtgttttatttattagtgaattttaagtgtttagtatagagtttggtaaatagtaaatgtttaataaatattcgtttagtgtatgaattggagtgattttttattttgtttataagttgaaaaaaggtttattatatatttaaatatgttgaaattatagggtatttggtaattttttaaaattaaaatttttagtttggaaatagaattttaattttgtgaaaataaaatttatttatttatttaaaaaatatttattaaataatgattatgttttatattaggttgagttttaaggatttaatgatgaataaaaattaatatgatttttgtttttaggaaatatatagtttagtgaggaaaatagattgtgagaagttttttaataaatattgggtgttattaaaatatattaaaaggtgagtgggtgagggatttgagttagtttaggtggtttaggaagtttttttggatgtgttgatatgtataggtattaattagataaatagagagaaggatgaattaatattgtaggtagagggaatagaatatgtaaaggtaggaaggattatggagtcgttggaggatttgaataaaggttagtgtaagtggattttagaaaataggaggaaaggtgtatgagatgagattagagaggtagattatgtggggtatggttaatgttttggatttttttattaagagtaatggggagatagtgataggatttaaacggggaaataatatgattagattaaattttttaaaaaattttttatgtaaatatatattgagagttaattattgataaagatttaaaggtaataaagtggagagagaatagtatttttaaaaaatggtgttaaaataataggatatttatattaaaagttgggtatttgtttataaaatttaatttaaaatggattatagatttaaatgtaaaattgaaagttatataatttttggaagaaaatatagatgggaatttgtgtgattttgagtttgaaaatgatttattatatttgatattataattcgtaagttaatataatttataagtgaataaagtgatgaattggattttattagaatttaaaatgtttgtgttttaaaagatattggtatgataatgaagataaattatagataagatattgttgaattatatttttgataaaggaattgtgtttagaatatataattttaaaatttttataataaattataagtagtttaattaaaaaaaaaaaaagagaaaaaatttatagtttttattaaagaaagtatataattgtaaaataagtatatgaaaaatgttttgtatttttatttatgggagaaataaaaattaaatgggaaagatatttttaattagaatattaaaattaaaaagattgattatattaagtattggtgaagtggaaatgtaaaatgatataattatttaggaagatgatttggaagttttttataaaagtaggtgtatatttattttgtgatttatttattttatggttaagtatttatttgagagaaatgaaagaatatatttatataaagatgtttatataaatatttatagtagttttatttgtagtagttttaaattgaaaagaatttaaatgtttattaaaagtgaatggataaataaagcgtggtatagtaatgtaatagaatattatttagtaataaagaagaatgagttagtgatatatataatagtttaaatgtatattaaaggtattgtgtttagtgaaagatgtaagtaaaaaaaaaaaagagtatatgttgtatagttttattgatataaaattttggaaagtgaaaaatagtttatattgatagaaagtagattattggttgtttgaggaggaggagtataggagaggtggagggaaaatgtataaagtggtataataaaaatttttggaattatagatatatttattattttgattgagtgatgattttatgagtgtacgcgtgtgttaaaaatgattaatttatgtaattttaaatatgtgtagtttattgtatatattaattatattttagtacggttattaaaaagaaattttttggttgtataatgtagaattgattttaggaaagagtggagggaggatgattatttatagtgttttaggtggaagagaacggtgttttttggaagtgaattaggttggtaataatagagatgaaataaatgggtagatgtgtgagatatttaggaaataaaattcgatggttattattttttaaaggttagtttattttggttttttagagtaaagagttagggaagattttattaataaattttttttgaagttgtagaggaagtttatagtagaaatttatttttaatttgattaatttgagagaatatttttggttttatttgattattaaaaaattgtaaagaataggaggagaaagaagaagaaagttggtataaatagtgaatttatataatattaattaataattgttttttgtttttaaaagtaatgggaagaaaatgagatttgagttggaagattagagtttaaaatttaaataaagtatatggttttaatatgtttatagtagttaattttttttgataatgatataattgttgatagtattatttttaaaaataaaaataatatagtaattttttagatttgtagaatgtttttttgtttataagtttgttttatatatattatgttttttaaatgatatattagttttttgagggtaatttatattggtaatagtttttagatgtggaaattgtgaagataatgttggtgatgtggaagtaatataaattttggagttttttagatttaggtttgaatgttagattgttttttatttagagtaattttagagtattattttttattttaatttttttttaggtttttttgtgtttatgtgttttttttatttttgtttattgtttatttagtgatttttgtatttttttttattgttagtgtgtagatatatagtttttttggttttgagatttatgttaattttattttattattttgttagtttatttaatttttattgagtaatgttagttgaaagttgtggtgggattaaatgttgtaatgagtatttaaatgaggttgaagtatttacgtattttatttatatatggtgaggtatatttaaggaaggttgtagttattaaaattttaggaaataattttttatttttttaggtgaaagggtttttaggtttttgtgttttggaaggtttatttatagttattttttaaatgataatgcgattgatgagtttagagtttagtttaaatagtaatggattggaagattagtttaggttttattaatgtggaatatagaataaattatgtttttgttttagtttgtttatttgtgaaatagagtttattatatttagttttttttgtttttaggtttgagttattttttttggttaaggtaagtaaatgtttatgatgtttggttgtgtataagataaagttataataaagttataatttattttttttttgtagaagattgtaaaaagtaaaagagatttaggtaaaaatttcggaatgatttttggaatagagagtttttttagaattagaagttaaaggaatttaaaatatagggaggtttagggtttttattgatataaaggaaagatgttttttttataggtttacgtttatattttttttttttttttatttttatttgtatttttatttttatatagggtttatgggattttttttataaaagagtagttgtagtaatttatattattttttacgtttggttgtttattaagaggcgaaaagtagttttatataggttttatttttggatagttttagttgtaaagtttaaaatatgcgaaggtaatttggaaaagtaagcggttgtatataaagtaaacgtttatagagttttggataaaattgagcgtttatgtgtatatggtaagtgtttttagtgtttgtgtgtttatttgtttgtttgggtgattttgtttttgagagtttggatgagaaatgtatggttaaaggtaattttagataggaagaaaggtagagaagagggtagaaatgatttttgatttttggggttgagggtttttagagtaaatggtataatgttacgaggttcgatttatttttatgacggaatttaaggttttagtaagtatttgttggtttggttatggtttgttttttagtttgtaggagatttttttatttttttatttgcgcgtttttattagttttgaaaagaatttttggtagttaggagtaggtatttttatcgttttttttttttttttttcgtttttattttgttggttttttagattgggttttggaattaaatttggtgagtgttggtttttaggaaatttggagttttggcgtttaaattttggtttaggaaagtaggagttatttaggaagtaggggttttttagggttagagttagttttttttgttttcgtttacgttgcgttagtatttgtttttttaaagttattaggtaggcgttagcgcgcggtgaggggaggggagaaaaggaaaggggaggggagggaaaaggaggtgggaaggtaaggaggtcggttcggtgggggcgggattcgattcgtaaattgttgtatttgttttttattttttagcgtttttttcgagatttcggggagttagtttgttgggagagcgggacggttcggagtaagtttagaggtagaggaggcgatagagggaaaaagggtcgagttagtcgttttagtgttgtataggagtcgaagggacgtattacgttagttttagttcggttttagcgatagttaacgttttttgtagcgcggcggtttcgaagtcgtcgttcggagttgttttttttttttcggtgaagtttttaaaagttgttaaagattcggaggaagtaaggaaagtgtttggtaggattgacggttgtttttgttttttttttttttatttcgtttttttttattttgttttttttttttttttcgttttttttttcgtagttgttttagtcggttatttttagttaattttttttattatttttttttttattcgttttttcgttttcgtcggtttagcgttgttagttcgagtttgtagagaggtaattttttttggttgcgagcgggcgagttagttgtatattgtaaagaaggtttttaggagttaggcgattggggagcggttttagtattgtagttacgattcgtttggttaggttgtacgcggagagaattttttgtttttttttattttttttttatttttttttgttttttttatttcgagtgcggagttagagattaaaagatgaaaaggtagttaggtttttagtagttaaaaaataaaataaataaaaataaaaaagtcgaaataaaagaaaaagataataatttagtttttatttgtatttattttagtggatattgaatttggaaggtggaggattttgttttttttttttaagatttgggtattttttgaatttattttttaagtattaagagatagattgtgagtttagtagggtagattttgtttatcgtgtgtttttttttgtacgagattttgaggttgttagagcgttttttgcgtggttgttttcgtaagtttttttttttggagtttttcgtaggtgggtagttagttgtagcgattatcgtattattatagtttgttgaatttttttgagtaagagaaggggaggcggggtaagggaagtaggtggaagatttagttaagtttaaggatggaagtgtagttagggttgggaagggtttattttcggtcgtcgtttaagatttatcgaggagttttttagaatttgttttagagcgtgcgcgaagtgatttagaattcgggttttaggtatttagaggtcgcgagcgtagtatttttcggcgttagtttgttgttgttgtagtagtagtagtagtagtagtagtagtagtagtagtagtagtagtagtagtagtagtagtagtagtaagagattagttttaggtagtagtagtagtagtagggtgaggatggttttttttaagtttatcgtagaggttttataggttatttggttttggatgaggaatagtaatttttatagtcgtagtcggttttggagtgttatttcgagagaggttgcgttttagagtttggagtcgtcgtggtcgttagtaaggggttgtcgtagtagttgttagtattttcggacgaggatgatttagttgttttatttacgttgtttttgttgggttttatttttttcggtttaagtagttgtttcgttgattttaaagatattttgagcgaggttagtattatgtaatttttttagtaatagtagtaggaagtagtattcgaaggtagtagtagcgggagagcgagggaggtttcgggggtttttattttttttaaggataattatttagggggtatttcgattatttttgataacgttaaggagttgtgtaaggtagtgtcggtgtttatgggtttgggtgtggaggcgttggagtatttgagtttaggggaatagtttcggggggattgtatgtacgttttatttttgggagttttattcgttgtgcgttttattttttgtgttttattggtcgaatgtaaaggttttttgttagacgatagcgtaggtaagagtattgaagatattgttgagtattttttttttaagggaggttatattaaagggttagaaggcgagagtttaggttgttttggtagcgttgtagtagggagtttcgggatatttgaattgtcgtttattttgtttttttataagttcggagtattggacgaggtagttgcgtattagagtcgcgattattataattttttattggttttggtcggatcgtcgtttttttcgtcgtttttttatttttacgttcgtattaagttggagaattcgttggattacggtagcgtttgggcggttgcggcggcgtagtgtcgttatggggatttggcgagtttgtatggcgcgggtgtagcgggattcggttttgggttatttttagtcgtcgtttttttattttggtatattttttttatagtcgaagaaggttagttgtatggatcgtgtggtggtggtgggggtggtggcggcggcggcggcggcggcggcggcggcggcggcggcggcggcggcggcgaggcgggagttgtagttttttacggttatattcggtttttttaggggttggcgggttaggaaagcgattttatcgtatttgatgtgtggtattttggcggtatggtgagtagagtgttttattttagttttatttgtgttaaaagcgaaatgggtttttggatggatagttatttcggattttacggggatatgcggtaagtttttttttttagaaatgtcgtttttcggtttagggtagagttattttgtgttttggggtatttagcggtttttatttgcgcgaatatttagattgtttttgggagagtttagtagggtaaatttagagttttttcgtggattttcggtttgttagaggtttaatttgagtttttttaatttttgttgcgtgttttgggtgttgatttttgtttttttagattttttaatttttttaatcgttttaaatttttattattttttggtattcgaggttttaaatagaaattttattgtacgggttatttttagagataaagtttttaagttttttattttttttttttttttgtttttaaagtttgagaattttaataggaatttgggtaattttttttttttaggtttgttaggattttatttttagtttgcgtagattagagttaaaaagatcggtttaatagttttttagcgggtattttttagagaggtaaagtgaaattttcggttagggaaagaaagtggtttttgggtgttgaggtttgttgtgtgaaagggtgaattttttttttttgaagtaattggggatttgttttagggttggaggttagtagagataatttaaatcgttatgtttagagtaggtagaggggtaatttttttggtaaagattttataggatttgtatttatagttttttaacgttggttgattatgttgaaagtagttgtttgggtcggtttttttttgtaaagtgtttattttttttgtggattataatagatttatagttttttattttaggtttgtattagatttataaagaggagaatatttttttaatgtataatttaattaggtttgattttgatttataaaattgttggaaaatatttttttgtaaagtattttttgttattttagtgtgttttaaaatttttattggggagggtggagtgaggttttttattatatttttttatttttaggatatgtttgtattttagaatatgtgtagttagtt

SEQ ID NO: 142 - DNA, 8759 bp, Artificial Sequence
  chemically treated genomic DNA (Homo sapiens)
agttaattgtatatattttaaaatgtaaatatgttttaaaaataaaggaatataataaaaaattttattttattttttttagtggagattttggagtatattgaaatagtaggaaatgttttataaaaaaatgttttttaatagttttgtaagttagagttaagtttaattaaattgtatattaaaagaatatttttttttttatagatttgatgtaaatttgaagtagggggttgtggatttgttataatttatagagaaaataaatattttataagagaaaatcgatttaagtaattatttttaatatagttaattaacgttgagaaattgtgagtgtaaattttgtgaagtttttattaagaaagttgtttttttgtttattttaaatatgacggtttggattatttttattgatttttagttttggagtaagtttttagttgttttaggagaaagaagtttatttttttatatagtagattttagtatttagagattattttttttttttaatcgagaattttattttatttttttggaggatattcgttgagaagttattgggtcggtttttttgattttaatttgcgtaggttgaaagtgaaattttaatagatttgaagaggagaaattgtttaaatttttgttgaggtttttagattttgaggataggaggaaaggaagagtggagggtttgggagttttatttttgaaggtggttcgtgtaataggatttttgtttgggatttcgagtattaggaggtagtgagaatttggggcggttgggggagttgaagaatttgggagggtaggaattagtatttagggtacgtagtagaaattaggagagtttaggttaaatttttggtaggtcgggagtttacgggagagttttaggtttattttgttgagtttttttaggggtaatttgagtgttcgcgtaggtaggagtcgttagatattttagaatatagagtgattttgttttgggtcgaaaggcgatatttttggaaggaaaaatttatcgtatgttttcgtaaggttcggagtagttatttatttaggggtttatttcgtttttgatataagtgggattgggatagggtattttgtttattatgtcgttagggtattatatattaggtgcggtgaagtcgtttttttggttcgttagtttttgagggggtcgagtgtagtcgtagggggttatagttttcgtttcgtcgtcgtcgtcgtcgtcgtcgtcgtcgtcgtcgtcgtcgtcgtcgtcgttattatttttattattattatacggtttatataattggtttttttcggttgtgaagagagtgtgttaggatgaggaagcggcggttgagggtgatttagaatcgggtttcgttgtattcgcgttatgtaggttcgttaggtttttatagcggtattgcgtcgtcgtagtcgtttaggcgttgtcgtagtttagcgggttttttagtttgatgcgagcgtggggatggggaggcggcggagggggcggcggttcggttagagttagtggaaagttgtagtagtcgcgattttggtacgtagttgtttcgtttagtgtttcggatttgtagagagatagggtagacggtagtttaagtgtttcggagttttttgttgtagcgttgttagagtagtttaggttttcgttttttagttttttggtgtaattttttttgaaaggggaatatttagtagtatttttagtgtttttgtttgcgttgtcgtttagtagagaatttttgtattcggttaatggggtataaggagtgggacgtatagcgggtggaatttttaaaagtggggcgtatatgtaattttttcgaagttgtttttttggatttagatgttttaacgtttttatatttaggtttatggatatcgatattgttttatataattttttggcgttgttagaaatggtcgaagtgttttttaagtaattgtttttggaggaagtgggagttttcgaggtttttttcgttttttcgttgttgttgttttcggatattgttttttgttgttgttgttgaaggagttgtatggtgttggtttcgtttaggatgtttttaaggttagcggagtagttgtttaagtcggggaaagtggggtttagtagggataacgtggatggggtagttgagttattttcgttcggaggtgttggtagttgttgcggtagttttttgttggcggttacggcggttttaggttttgggacgtaatttttttcggggtggtattttagggtcgattgcggttgtgaaggttgttgttttttatttaggattaggtagtttgtggggtttttacgatgggtttggggagaattatttttattttgttgttgttgttgttgtttggggttagttttttgttgttgttgttgttgttgttgttgttgttgttgttgttgttgttgttgttgttgttgttgttgttgtagtagtagtaaattggcgtcgggaggtgttgcgttcgcggtttttgggtgtttggggttcgggttttggattatttcgcgtacgttttggaatagattttggaaagtttttcggtaggttttggacggcggtcgagggtagattttttttagttttaattgtatttttatttttgagtttggttgaattttttatttattttttttatttcgttttttttttttttgtttagaagagtttaataggttgtgatgatgcggtagtcgttgtagttagttgtttatttgcgggaagttttagagaaggaaatttgcgggagtaattacgtaaaaagcgttttgatagttttaaagtttcgtgtagaagaagatatacggtggataagatttgttttgttaggtttatagtttgttttttaatatttgaagggtagatttaaaagatgtttagattttaaaagaaaaaaataaaattttttattttttaaatttagtgtttattgaagtaggtgtaaataagaattgagttattattttttttttttatttcggtttttttgtttttgtttgttttgttttttggttattgaagatttgattgtttttttattttttgatttttggtttcgtattcggggtggggaaggtaggaggaggtggagagagagtgggggaaaatagagggtttttttcgcgtgtagtttaattaggcgggtcgtggttgtagtgttgaagtcgttttttagtcgtttggtttttaagagttttttttgtaatgtgtagttagttcgttcgttcgtagttaaagggagttatttttttgtaaattcgggttggtagcgttgggtcgacgggggcgggggggcgggtggggagaagggtggtgaggggggttggttgagagtagtcgattgaggtagttgcgggagagaagacgggggagggggggaaggtagggtggggggaggcggggtggagaggaggaggataaaggtagtcgttagttttattaggtattttttttgtttttttcgagtttttagtagtttttaaaaattttatcgaagaggaaagggtagtttcgggcggcggtttcgaagtcgtcgcgttgtaagaggcgttggttgtcgttggagtcgggttggggttggcgtggtgcgttttttcggtttttgtatagtattggagcggttagttcggttttttttttttttgtcgttttttttgtttttgggtttgtttcggatcgtttcgtttttttagtaagttggtttttcgggatttcggagggggcgttgggaggtggagagtaaatgtaatagtttgcgagtcgggtttcgtttttatcgggtcggtttttttgtttttttattttttttttttttttttttttttttttttttttttttttttttatcgcgcgttaacgtttgtttagtggttttggagaaataagtgttggcgtagcgtgggcgagggtaggagaggttagttttagttttggaggatttttgttttttgaatagtttttgtttttttaaattaaggtttaggcgttagggttttagattttttggaggttagtatttattaaatttggttttaaagtttaatttaaaaaattaatagggtggaggcgagggagggaggaaaaggacgataggaatatttgtttttggttgttaggggttttttttaggattgataagagcgcgtagatgggagagtgggagagttttttataaattgaggagtaagttatgattaagttagtagatatttgttgaaattttagatttcgttatagggatagatcgggtttcgtggtattgtgttatttgttttaggaatttttagttttaagaattagaggttatttttatttttttttttgtttttttttttgtttggaattgtttttaattatgtattttttatttagatttttaaaggtaaaattatttagataagtaggtaaatatataaatattaaaaatatttgttatgtatatataggcgtttaattttgtttagagttttgtaaacgtttgttttgtatgtagtcgtttgtttttttaagttgttttcgtatattttaaattttataattggaattatttaaggatagaatttatatagggttgtttttcgttttttgatggatagttaggcgtagaggatgatgtgggttattgtaattgtttttttgtggaggaggttttataagttttgtgtaaaggtggagatgtaagtgggaatggaaagagagagaaaatgtaaacgtaaatttataaggaaaatattttttttttatgttagtagagattttgggtttttttatgttttaaatttttttgatttttgattttggggaggttttttgttttaaaagttatttcgagatttttgtttgggttttttttgttttttgtagttttttatagagaaaagatgggttgtagttttgttgtagttttattttgtgtatagttaaatattataggtatttatttattttgattaaagaaggtaatttaaatttaaaggtaaggaagattggatatgataggttttattttatagatgaataggttgaaataaggatataatttgttttatgttttatattagtaaaatttaaattagttttttagtttattgttatttgagttagattttagatttattaatcgtattgttatttgggaaatggttataaatgaattttttagaatataaaggtttgaagatttttttatttgaggaggtgaaaaattattttttgagattttaatggttatagttttttttgaatatattttattatatgtaagtagaatgcgtagatattttaattttatttgaatatttattgtaatatttaattttattataatttttaattagtattgtttaataggaattgagtgggttggtaggatggtagaatggaattaatataggttttagagttaggagaattatgtgtttatatattaatagtgaaggaaggtgtaaaaattattgaatgaataatggataggagtgaagaggatatatagatataaagaggtttgaaaaaaaattaaggtgagaaataatgttttgaagttattttgaataaaaagtagtttgatatttaaatttgggtttgaaagattttaaagtttatgttgtttttatattattaatattgtttttatagtttttatatttgaaaattgttgttaatataagttatttttagaaggttagtgtgttatttaaaagatataatgtgtatagaataaatttgtaaataggaaagtattttataaatttgaaggattattatgttatttttatttttaaagatggtgttgttaataattatattattattaggaaaggttaattattataagtatattagggttatatattttatttggattttgaattttgattttttagtttaaattttattttttttttattgtttttaagaataagagataattattgattaatattatataagtttattgtttgtattagttttttttttttttttttttttgttttttgtagttttttagtaattaaatggaattagaggtgtttttttagattagttaggttgagagtaagtttttgttataagttttttttgtaattttaagagggatttattaataaagttttttttagttttttgttttggaaagttaggatgagttgatttttggaaaatggtgattatcgggttttattttttaagtattttatatatttgtttatttattttatttttgttgttgttaatttagtttatttttagaaggtatcgtttttttttatttggagtattgtaaatggttattttttttttatttttttttagaattagttttgtattgtgtagttagagggtttttttttaatagtcgtattgaggtataattgatatatataataaattgtatatatttaaagttgtataaattgattatttttgatatacgcgtgtatttatgaaattattatttaattaagatagtgaatatatttatgattttaaaagtttttattgtgttattttgtatattttttttttattttttttatattttttttttttaggtaattaatgatttgttttttgttagtatagattgttttttattttttagagttttatgttaatggaattatatagtatgtatttttttttttttttatttgtattttttattgagtataatgtttttgatgtatatttaagttgttatgtatattattagtttatttttttttattgttaagtagtattttattgtattgttgtattacgttttgtttatttatttatttttgatggatatttgggttttttttagtttggggttattataaataaaattgttataaatatttgtataaatatttttgtatggatgtatttttttattttttttaggtaaatatttagttatggaatgggtgagttatagggtaggtatatatttatttttgtaagaaatttttaaattatttttttaagtgattgtattattttatatttttattttattaatatttggtatggttagtttttttaattttagtattttaattagaggtgttttttttatttaatttttattttttttatgaataaagatgtagagtattttttatgtgtttattttataattgtatattttttttgatgaagattgtaaattttttttttttttttttttttaattgggttatttgtaatttattatgggggttttagagttatgtattttgagtataatttttttattagaaatatgatttaataatattttatttgtagtttgtttttattattatattagtgttttttgaagtataaatattttaaattttgatgaagtttagtttattattttgtttatttatgaattatgttaatttacggattatggtgttagatataataaattatttttaaatttaagattatatagatttttatttgtgtttttttttagaagttgtatagtttttagttttatatttaggtttgtgatttattttgaattaagttttgtagatagatatttaatttttaatatagatgttttattgttttggtattattttttgaaaatattattttttttttattttgttgtttttgaatttttgttaataattaatttttaatatatatttgtatagagggttttttagaaagtttaatttggttatattattttttcgtttaagttttgttattgtttttttattgtttttaatagaaaagtttaaaatattaattatattttatatgatttgtttttttgattttattttatatatttttttttttgttttttgagatttatttatattggtttttatttaggttttttaacgattttataattttttttgtttttgtatattttgttttttttatttgtaatgttggtttatttttttttttatttatttagttaatgtttatgtatattagtatatttaggaagattttttgaattatttaggttagtttaagttttttatttatttattttttaatatattttaatagtatttagtatttgttggaggattttttataatttgttttttttattgaattgtatgttttttaagagtaggaattatgttggtttttgtttattattgaatttttaggatttagtttggtgtgggatatggttattgtttaataaatattttttgaataaatgaatggattttatttttatagaattaaaattttgtttttaaattgggagttttggttttggggggttgttaaatgttttgtgattttagtatatttaggtatgtaataaatttttttttaatttatgagtaaagtagagaattattttaatttatgtattgaacgaatatttgttaagtatttattatttgttaggttttgtgttaggtatttggaatttattgatgaataggatattgtggattttgtatttaaggagtttatttatgatttaggaaggagagtgaagaataatttaaataattatatttgaattggattggagatgaaaagaggggtttatgaataaatttttagagttgttgtttttgttgatttgtggatatttgttattttttttgtatagatgtttataatggattatttttttattttaatattttttttgtttttaatgttgaagttattattttattttatttttttttatagttttagttttaattttttttttggttgtttttttttaggtta

SEQ ID NO: 143 - DNA, 8404 bp, Artificial Sequence
  chemically treated genomic DNA (Homo sapiens)
aggaagttaaaaattttgaaaaaaggttagaggaattgttatttaaaataagtagtttagagaagaatataaatgatttgatggagttgaaaaatatagtataagaatttcgtgaagtatatataagtattaatagttaaagtagaagaaaggatattagagattgaagattatttttatgaaataaagtgtgaagataagattagaggaaaaagaatgaaaagaaacgaataaagtttttaagaaataggggattatgtgaaaagattaaatttatgtttgattgtttttgtatttgaaagtgatagggagaattgaattaagttggaaaatattttttaggatattatttaggagaatttttttaatttagtacgataggttaatattttaatttaggaaatatagagaatattataaagatattttttaagaagagtaattttaagatatataatcgttagatttattaaggttgaaatgaagttaaaaatgttaaaagtagttagagagaaagtcgggttatttataaagggaagtttattagattaatagtggatttttttgtaaaaattttataggttataaaagatgggggttaatatttaatatttttaaagaaaggaatttttaatttagaattttgtatttagttaaattaagttttataagtgaatgataaataaaattttttatagataagtaaatgttgagagattttgttattattaggtttgtattataagagtttttgaaggaagtattaaatatggaaaggaaaaattggttttagttattgtaaaaatatattaaattgtaaagattattgatattatgaagaaattaatgggtattaattaatgggtaaattaattggttagtattataatgataggattagatttatatataataatattaattttaaaagtaaacgggttaagtgttataattaaaagatatagattggtaagttggataaagagttaagatttattagtgtgttgtatttagtagatttattttatatgtaaagatacgtgttttaaataagggaatggaggaagatttattatagtaatggaaagtaaaaaaaaaaaaaagtaggggatgtaattttagtttttgataaaatagattttaaattaacgtagattagaaaaagataagaagggtattatatgatggtatagggattaatgtaatatgaagagttatttattttaagtatgtatgtatttaatataggagttattagatttataaagcgagtttttggagaggaagaaagagatttagatttttacgtaataatagtgggagattttaatatttcgttgttaatatttgatagattaatgagatagagtaattaataaggataattaggattttaagttagttttgtattatttagattaaatagatatatttaatatatatatatatatatatatatatatatatattttttgagatggggttttgtttttgtcgtataggttgaagtgtagtggtatgattttagtttattgtaatttttgttttttgggtttaagtgatttttttgttttagtttttagagtagttgggattataggtatttgttattatatttagttaatttcgtatttttggtagagatgtggttttattatgtttgttagtttggttttaaatttttgattttaggtgatttattcgttttggttttttaaattgttgggattataggcgtgagttatcgtatttggtttagattttgtcgaaattttaatatttttttggtaatgtaatagaaaattaaagattttgatggtgaatttaattgtttttgagttgtgtggatgaaaatatattttattatttttttttttaatttttaagtttttaggtatatgtgtaggatgtgtaggtttgttatataggtaaatgtgtgttatggtggtgtgttgtatagattaatttattattatggtattaagtttagtatttattagtttttttgatgttttttttttttttattttttttcgttataggttttagtgtgtgttgtttttttttttgggtttattttatggtatgtatgtgtgtatgtgtgtgtgtgtgtgtgtgtgtgtgtgtgtgtgtgtatttatttatgtgtatatattatgatatatatattatattttttttaaattattattttaggtttagggatatatgtgtaagtttgttatataggtaaattgtgtgtttttggggtttggtgtgtatagatttttttattatttaggtaataagtgtagtatttgataggtagttttttgattttttgtttttttattttatatttttaagtaattttttagtgtgtgttgtttttttttttatgtttatgtgtttttattgtttagtttttatttataagtgagaatatgtagtgtttggttttttgtttttgcgttagtttgttgaggataaaggtttttggttttatttatgtttttgtaaaggatatgattttatttttttttatggttgtaggaaaatatattttatatattagtgaatatagttaaattaatttatggttaagatatatatttttttgtaaattgagaaatttttttattataattgtaatatggtaataaataaatttagattatataaatgtaatttagatgttgataaattggttttaaataaagtaagtgatatttacgtatgaagagagtttattttagtttttagaatttttttttatttttttgttatttttatttttagtaagtaagtatttattgtgtgtgtaatattgtgttaggtattaaggtaatgatgatatttaagatttggtttttattttgaagataagtataggagaaatattattagttatgatgttttttgttgtaaataagtgaaaattttagtttagtttaggttagttttagggttggttaaattagaggtttatttataatattgaggatttagatttttttgaaattttttttgtattaatattagtatttttattttttttgtagggtggtttgttttacgttataatggttgtagtaattagaagtgttatatttttagtaatatttaatattattattattatttaataatatttagaattgtgttatttttgttttaatttattaggtttttagtagattattttttattttttaaatgttaaaattgtattttgagtttttgtttaaattaatttggggtgaggtgaatggaagtagtattttaattgtatttattttttgtagttggatttgggtttgggttattttttgatatttgtttataagaaagatttttgaagttaggtaggaatggttgttgagtaggttagtgtttgttaaatttttatatatttttatatatgttataatatgtagataaaaagataattttttatataatttgttgggataaatttaggaggtttatagtatgatttgtttgaaggttttttttgttttagattttgtttagttgttttaggatgaggggatttatattatagtataattgtattttatttatagtataaattattttttttttttttagttgacgagtttagatgggtaataatagtgtttgttaaagagaaaaaaaaatgtatttaaattagataatttattggtataaatatcgagatatagaagtgataatagttttaagttaatgtttgatggtggtagttttagtaagtttttttttgatgtttttgtgtttttgtatatgttttttttttgttattgttttttttattaaatataatataatggataagtggaattaaatagaattgagtttaaattttttgttatttatcggttttggtattggataaattaatttttttgagtttgtttttttatttgtaacgtagattagttaatattatttattggaaagcgttgttttttagttaatgtatgtaaggtttaaaatttagatgacgggttgataggtgtagtaaatttttatggtatacgtatgtttatgtaataaatttatacgttttgtatttgtatttcggaatttaaagtaaaaaaaaaaaaaaaaaaaaaaagaaagaaagaaaaagaaaaaaaaggttgtttttggggattaaataagataattatgtaaggtggttagtatagtttttggtatatagtaaatgttaggtttgtttgatagatttttatttagtagttattgtttttttgaaaattttttttagacgtttttacggtgtttttcgtttttatattattataattttttattatattattattcgtttattttttatagttttttttttttttttttttaattagtgattttaaaaggttagtaagtgtttaatattttttattttttaagtgattggtaaagtttcgtatttattagcgttttaagtttgtttttgttttggtcgattttgtaaaacggattgggcgggatgagaggtggggggcgtcgttaaggagggagagtggcgttttcgtcgagggtgtattagttagatattttttgcggggttcgagagttttttttattagatttcgggatagggatgaggtttatagttatttattagattttttgtatagtttcgttaagtgtatttcggtttggagggggtggttttgggtagaagtacgttcgggtcgcgtcggatgttttttggaaggcgtttggatttacgttaggttttttagtttaattttttatgatttagcgttttagttcgcgtatcgattagcgttttagttttttatagacgtcggcgggttcgggagtttcgcggacgtgacgtcgcgggcggaagtgacgttttttcgcggttggacgcggcgtttagttgtcgggcgggggagggcgcgttcggttttttttaggggacgttgaaattatttttgtaacgggagtcgggagaggacggggcgtgtttcgacgtgcgcgcgcgtcgtttttttcggcgtttttttatagttcgttggttttcgtcgcggaaaggcgttatgtcgtttaaaatttttcgaaaaacggtcgttatcgtcgtcgttgtcgtcgcggaattttcggtatcgtcgtcgtcgtttttttttgaggaggatttagagtaggatagcggttcggaggatttgtttttcgttaggtgagcgagtagagtcgtcgtcgttttacgcgggaagggcgtttcgggtgtgcgtagggcgggcgtaaggcggttcggcggggattcgttttcgttaggggtcgggtttcggcgggaggaggcgttttttttgtttttcgttacggcggagcgtttgtagaatggtgataggattttgggtttttgggcgaggggtttcggttttaatttgataggtgtcgggcgggtggggttagggttttgagcgaagtgataggtgtagtttttttttgtgaggttcggaggtagagggtcgttgcgagcgtttattagacgtaaaaaatgaaaaataaaaatataaaaatggtgtttgtgggagagttttttatcggagaattggagtatttcggtggtcgtttgattttttgttttggtttacgcgatgtaatagttgggaagtattttttttcgggcgtgtattgtatttgaagtttatttgtgggagaggtcgattagaaagttttggataagaagcgtagggttttgagtgtttattgtttataggatattcggtttaggagttttgcggcgtttttttagaataataatgtatcgaggttttggggatttaaagttatttgtagtgattgatggagcgtaattttttagaggaattgaaatatgggtaaaatttttatgagatatttattagaagtgtttgaaagtttttaaattttttttttttttgtttgatgaattttttttgcgtgttagtcggtttcggtttgttttattattttttttattttgttttttgattttgaattagtaaggattttggtgttttttttttttgtttttgtttttggtataaaattagtggttttgtgcgtaaatggaaattttcgtttttttttattaagtggaatttaaatttaagtaagtttatacgaatgtattagattttgaagggaagtatttattgtattataatattttattttttttgatttttttattttatggttaaatagttatgattgaaagagtgtaattgttattattgttagtattggttttattttgagataagtttattgtagagggaatgggatttgtttttgttttttattatttttttttttatttttgtttattattaaatttttttatttttatttatttttttttattcggtatatattaataatttacggtagaaaagattgaagtgggatttaggaaatggtttttggaaggttattaaaaatttatatatttaaatggattgttttataggttagttaaaaattatattcgttaaaaaattaaaataataataataaaaaattaaaaattacgtttggggtatgttttgggaaaagatatggttttagtttttgattaaattttgatgtatttaatttttgtaaattttttttgggaaaatgtagtaatggttattttaaagaattttatgttatgtatatagttttggaagtatattttaatgtagggtaattaggaatattgacgttgtggttattgtttggaaaaaagaggattgttttttttattttttaatttattttatatattttaagtaatggaattataaaaaatttttttataagttaaaattatataagatatagtttgtttttgattatttatatttataaagggttttattaatatagatagttgaattttataaattaattagtaagggtagaattattgtcgtgtagtttgatattgagtattttgtttggagatggaattaaggtttagtttaattgtatttttagtgatagattttatttttgatttgagagtttagattttatttttgttgttttatttttggtttaagtaatgtagttggaagggaaattgttattaggaatagtatattatatttattgttgaaataattaaaggttaattatgtttcgagttgggtgtgatggcgcgtatttgtagtttatgttatttaggaggttgaggtaggaggattatatgagtttgggagttggaggttagtttgggtaataacgtaagattttagtttttaaaaaaataaaaaagttgattaggtatgttggtttacgttgtaatgttagtattttgggaggttaagatgggaagattgtttgaggttaggagtttgagaggagtttgggtaataaaataagattttgtttttaaaataaattttaaaaaattagttagtggttgtggtatatttgtaggtttatttatttaggaggttgaggtgggaggatttttgagtttaggagtttgagattgtagtgagttatgattttattattgtattttagtttggatgatagagtgaaattttattttaaaataagaaaaaaaaataaaaattaattatgttttgaaggaggaattggtagtttagaatagtggttaagggtatggattatagagttagattgttgggtttatatagtggtttattttttatcggttgagattttaggtaagttttttaatttttttaatttgatagatatttgtaaatgtttatttttatagatgagaatatttatttaaaagggttgatgtcgggatttagtgaaattatatgtttaaggtattttttataggattatagtaaatatttaaaaattattaattattttttatattatttttattagtagataatatatagaaattagatgaatgaaaatgaattagttaataagaatttattaaatgtttgtttttgttaaggggaaaggataaaaataagtagtcgtattatgtaagatgtgttagtaggtagagagatatatgaaatattgataagagaagattatagtttaataaagttattggcgttgaattgtataatattatttatgggtttttatttttttgttgttatttttattttatttttttaaatagttttagttattatatttatttttttttatagaagtgttttgttgttttgaagtatatttgatttattatgtaagtaaatattttttattgtgtggtatttttattttggaatgattatgaaaaagataattatatgtttaaatttgaagtgtaatgtttttttaagataaaataagattttaaagtatttaataatgtttttttttatagtagtgttatgtgtaaattattgaaataagtatgtattgaattaatttgatttataagtatatgttaattatatgattatttttatttggtagg

SEQ ID NO: 144 - DNA, 8404 bp, Artificial Sequence
  chemically treated genomic DNA (Homo sapiens)
tttattaaatgaaaataattatataattggtatatatttataaattaaattgatttagtatatatttgttttaatagtttgtatataatattattgtgaaaaagaatattattaaatattttaagattttattttattttagaaaaatattatattttaaatttaaatatatgattattttttttatggttattttaaaataaggatattatatagtgaaaaatatttgtttgtatggtaagttaaatatattttaaagtagtaaaatatttttgtgaaggaaagtaaatgtaatagttaaagttgtttgggaaaataggataaagataataataaaaagataaaaatttatagataatattatataatttaacgttagtgattttgttaaattgtagtttttttttattaatgttttatatatttttttatttattagtatattttatatgatgcgattgtttatttttgttttttttttttaataaagataagtatttaataaatttttgttggttaatttatttttatttatttaatttttatgtgttatttattaataagaatagtatgaagaataattaataatttttgagtatttattatgattttgtagaaagtattttaaatatatggttttattgaatttcgatattagtttttttagataagtatttttatttgtaaaagtagatatttatagatgtttgttaaattggagaagttaaagaatttatttgaggttttagtcggtaagaggtaaattattatgtgagtttaatagtttaattttataatttatgtttttgattattattttagattgttaattttttttttaaaatataattagtttttgttttttttttttgttttgaaatagggttttattttgttatttaggttggggtgtagtggtgaaattatggtttattgtagttttaaatttttgggtttaaggatttttttattttagttttttgagtagatgagtttataggtgtgttatagttattggttaattttttaaaatttgttttagagatagggttttgttttgttgtttaggttttttttaaatttttggttttaagtaatttttttattttggttttttaaagtgttggtattatagcgtgagttaatatgtttggttagtttttttgtttttttaaagattggggttttgcgttgttgtttaggttggtttttaatttttaagtttatgtgatttttttgttttagttttttgagtagtatggattataggtacgcgttattatatttagttcgaaatatgattaatttttgattattttaataatgaatgtggtatgttgtttttagtgatagttttttttttagttatattatttaggttagagataaggtaatagaaataagatttaaatttttaaattaggaatggaatttgttattggaggtgtagttggattgagttttgattttatttttaggtaagatgtttagtattagattgtacggtagtggttttatttttgttggttaatttatagagtttaattgtttatgttaatgaaattttttgtgggtatggataattaagaatagattgtattttgtatggttttgatttataagagaattttttatagttttattatttaaaatatataaaatgagttaaaaaatgaaagaaatagtttttttttttttaagtagtggttataacgttaatatttttggttattttatattagagtatgtttttaaagttgtgtgtataatatggaattttttagagtagttattattgtatttttttaagggaaatttgtaagaattggatatattagaatttaattagaaattaaagttatgtttttttttagaatatgttttagacgtggtttttaattttttgttgttgttattttggttttttaacgaatatggtttttaattgatttataagatagtttatttaaatatataaatttttaatagttttttaggggttattttttaaattttattttaattttttttgtcgtgaattgttagtgtatatcgagtggaaagaaatgggtgagggtgaaaggatttggtgatagataagaatgggagagaaaatagtgaaaaatagaaataagttttattttttttgtaatgaatttgttttaaagtagaattagtgttgataataatgataattatatttttttaattatagttatttaattataaagtagaaaaattaagaaaagtaagatgttgtaatataataaatatttttttttaagatttagtgtattcgtatggatttgtttaaatttagattttatttaataagggaaaacgaaaatttttatttgcgtatagaattattaattttgtgttaaaaataaaggtaaaaagaggggatattaagatttttgttggtttaaagttaaaaggtaaaatggaagaaataatgagataagtcgaagtcgattaatacgtaagaagagtttattaaataggaaaaaaaaaagtttagaaatttttaagtatttttggtaaatgttttatgaaagttttgtttatgttttagtttttttaaagagttacgttttattaattattatagatggttttgagtttttaaggtttcgatgtattattgttttaaggaaacgtcgtaaagtttttgagtcgagtattttgtgggtaatggatatttaggattttgcgttttttgtttaaggttttttggtcggttttttttataaatggattttagatgtagtgtacgttcggaagaaaatattttttaattgttgtatcgcgtgaattaaaatagaaagttagacgattatcggagtattttaatttttcggtgaaaaatttttttatagatattatttttgtatttttattttttattttttgcgtttgatggacgttcgtaacgattttttgttttcgagttttataagagggaattgtatttgttatttcgtttaggattttagttttattcgttcgatatttgttaagttgaagtcgagatttttcgtttaagaatttagaattttgttattattttgtagacgtttcgtcgtggcggggggtagggagggcgttttttttcgtcgggattcggtttttggcgaggacgggttttcgtcgagtcgttttgcgttcgttttacgtatattcggggcgtttttttcgcgtgaggcgacggcggttttgttcgtttatttgacgagaggtaggtttttcgggtcgttgttttgttttgggttttttttaggagggggcggcggcggcggtgtcgggggtttcgcggcggtagcggcggcggtggcggtcgtttttcggggggttttgggcggtatgacgttttttcgcggcgggagttagcgagttgtggaggagcgtcggggaggacgacgcgcgcgtacgtcggggtacgtttcgttttttttcgattttcgttataaaaataattttaacgttttttgagaaaaatcggacgcgttttttttcgttcggtaattgagcgtcgcgtttaatcgcgggaaaacgttattttcgttcgcggcgttacgttcgcgaggttttcgggttcgtcggcgtttgtggggaattggggcgttggtcggtgcgcgggttgggacgttaagttatgaggaattaaattgggaaatttggcgtgggtttaggcgttttttaggaggtattcggcgcggttcggacgtgtttttatttagaattattttttttaggtcggggtgtatttaacggggttatataaagagtttggtgggtgattgtgggttttatttttatttcggggtttgatagggaagattttcgggtttcgtagggaatatttggttagtgtattttcggcgggagcgttattttttttttttggcggcgttttttattttttatttcgtttaattcgttttgtaaagtcggttaaaataaaaataaatttggagcgttgataggtgcggaattttattagttatttagaagatagaaaatgttagatatttgttggttttttgggattattggttagggaaaggaagggagggagttgtggggaatgaacggatagtagtgtaataaaggattgtagtggtgtaagaacgggaagtatcgtggaaacgtttgaggaagatttttaggggagtagtagttgttgaatagaagtttgttaggtaggtttgatatttattatgtattaggaattgtgttggttattttatataattgttttatttaatttttagaaatagttttttttttttttttttttttttttttttttttttttttttttttttattttaagtttcgggatataagtgtagaacgtgtaggtttgttatataggtatacgtatgttatggaggtttgttgtatttattaattcgttatttaggttttaagttttgtatgtattagttaagaaataacgttttttaatgggtagtattagttagtttacgttgtagatgaggaaataggtttagaggagttaatttgtttaatattagggtcgatgggtagtagagaatttgaatttaattttatttgattttatttgtttattatattatgtttgatgaagaaaatagtgatagagaaggagtatgtgtaaaggtataaagatattagaaaagagtttgttgggattattattattaaatattggtttaaagttgttattatttttgtgtttcggtatttgtattaatagattatttagtttgaatatatttttttttttttttggtagatattgttattgtttatttgaattcgttaattgagaaggaaagagatggtttatgttgtgaataaaatatagttgtgttgtgatgtaaatttttttattttggagtagttgagtaaggtttaaggtaggaagaatttttaagtaggttatgttgtaagttttttgagtttattttagtaagttgtataagggattatttttttatttgtatattatgatatatgtgaggatgtgtaaaggtttggtaagtattggtttatttaatagttatttttatttaattttagaaattttttttgtgggtaaatgttaggagatagtttaggtttaggtttagttataaagaatgaatataattaaagtgttatttttatttattttattttagattagtttaggtaagagtttaggatgtagttttgatatttgaaagataaggagtagtttgttgggagtttgataaattgaaatagggatggtatagttttaaatattattaaataatagtaataatattaagtattattgaggatgtgatatttttgattgttgtagttattgtaacgtgaggtaagttattttatagagaaggtagaaatgttgatattggtgtaggaggaattttaaaagaatttggatttttagtgttataaatgagtttttgatttggttagttttggagttgatttaagttgagttgaggtttttatttgtttgtaatagaaagtattatgattgataatgttttttttgtgtttatttttaggatagagattaaattttgggtattattattgttttagtatttagtatagtgttatatatatagtaaatgtttgtttattaaaagtagggatggtaggaaagtgaaggaaagttttaggaattgaagtaaattttttttatacgtagatattatttgttttatttaaaattagtttattaatatttagattatatttatgtaatttagatttatttattattatattataattatgataaagagattttttaatttataaaagaatatatgttttgattatggattaatttaattatgtttattagtatgtaaaatatatttttttgtagttataaaaaggaatgagattatgttttttgtaggaatatggatggagttagaagtttttatttttagtaaattaacgtaggaatagaaaattaaatattgtatgtttttatttataagtgggagttaaataatgagaatatatggatatgaagaggggaataatatatattgggggattatttgagggtgtagggtgagaggatagaagattaaaaaattatttattaggtattatatttgttatttgggtggtgaaaaaatttgtatatattaaattttagagatatatagtttatttatataataaatttgtatatgtatttttaaatttaaaataatagtttgaaaaaagtgtggtgtatatattataatatatatatataaatagatatatatatatatatatatatatatatatatatatatatatatatatatatattataaaatagatttaggaaggggaataatatatattggggtttgtagcggggaagggtggggagagggagagtattaggagagttaatggatgttgggtttaatattatggtgatgggttgatttgtgtagtatattattatagtatatatttatttgtgtaataaatttgtatattttatatatatatttgggagtttaaaagttgaaggaaaaaataataaaatatatttttatttatataatttagaagtaattgagtttattattaaaatttttagttttttgttgtattattaaagaagtattagaatttcggtagagtttagattaggtacggtggtttacgtttgtaattttagtagtttgggaggttaaggcgggtggattatttgaggttaggagtttgagattaggttggtaaatatggtgaaattatatttttattaaaaatacgaaattagttgagtgtggtggtaggtgtttgtaattttagttattttggaggttgaggtaggagaattatttgaatttaggaggtagaggttgtagtgagttgagattatgttattgtattttagtttatgcgataagagtaagattttattttaaaaaatatatatatatatatatatatatatatatatattgaatatgtttatttagtttgaatggtgtaaaattgatttgaagttttgattatttttgttaattattttgttttattgatttgttaaatattgatagcggggtgttaaagttttttattattattgcgtgggagtttaagtttttttttttttttttaaggattcgttttatgaatttggtagtttttgtattgggtgtatatatatttaggataggtagttttttatgttgtattgatttttatattattatgtaatgttttttttgtttttttttgatttacgttggtttaaagtttgttttattagagattaggattgtattttttgtttttttttttttttgttttttattgttgtggtaaatttttttttatttttttatttagagtacgtgtttttgtatgtgagatgagtttgttgaatatagtatattgatgggttttgattttttatttaatttgttagtttgtgttttttaattgtggtatttagttcgtttatttttaaggttaatattgttatatgtgaatttgattttgttattatgatgttagttagttagtttgtttattagttgatgtttattagtttttttatagtgttaatggtttttataatttggtatgtttttgtagtggttgggattaattttttttttttatatttagtgttttttttaggagtttttgtaatgtaggtttggtggtgataaaattttttaatatttgtttatttgtgaaggattttatttattatttatttataaagtttagtttggttggatataaaattttgggttgaaaatttttttttttaagaatgttgaatattggtttttattttttatggtttgtagggtttttgtagagagatttattattagtttgatgggtttttttttgtaggtaattcgattttttttttggttgtttttaatatttttggttttattttaattttggtgaatttgacgattatgtgttttggggttgttttttttgaggagtatttttgtggtgttttttgtattttttgaattggaatgttggtttgtcgtgttaggttggggaaatttttttggataatattttgaagagtgttttttaatttggtttaattttttttgttatttttaggtatagggataattaaatataggtttggtttttttatatagttttttattttttggaggttttgttcgtttttttttatttttttttttttaattttgtttttatattttattttataaaggtgatttttaatttttgatatttttttttttgttttggttgttgatatttgtgtatgttttacgaagtttttgtgttgtgttttttagttttattaggttatttatgtttttttttaaattgtttattttaggtagtaatttttttaatttttttttaaggtttttagtttttt

SEQ ID NO: 145 - DNA, 5312 bp, Artificial Sequence
  chemically treated genomic DNA (Homo sapiens)
gtcggtttcgggggtcgacgatttttcgggtaggcgacgtgttttgtttaggttttatttttcgcgttcgtaaaacggggtggataacgtagtttaaggtagagtcgcgttaaggtttttcgttgtcgtcgggttttggcggtttgatcgggtttggggttcgagcgtgttttcgggtttgggggggtcgtcgcgatggattcgttggtagcgttttaggatcgtttggtggagtagttgttgtcgtcgcggatttaggtttagaggcggtttaaggtgcgtgtgtggagagggcggaacgtgggtttgtgatttcgcgggtttcgggattcggtatggggttttcgttttcgcgcgttacggttcgttagcgtttaggtttagttttttttttcgtagcggtttcgtaggttcgcggttttacggtggggcgacgtgttttgtttaggttttattttacgcgattttaaaacgcggcggagaatgcggtcgtgggatttttttaggggttttaagggtttgcgggggttgggcgtttgggcgcgcgggcgggggaggttcggcgtcgcggtttataaataggcgttgtttcgttatcgtcgttgtcgtcgttttcgcggttggattcgggttaggtggggtttttcgttttttggtatttttcggaggggtgagtgtcgaggtttttagttttttcggtttatggagggttttgagtgtgttttaggggttttaattttgttgttttttgttcgaggagggaggatatcgtttgtgtttgttgcggtttgatatttttttacggaataaatatagtgtcggtttttgtagagttttttttgggattggggttaggggtgtttttttttgttattatttcgtttgtttttttatttttaggtttttgtttacgggttttttttttatttttgttaacgaaatgttttattttgggaatcgtattttttgttgtttttttatatcgtatttggtaagagatagggtattgggtttttggagaaatttttgtgtttttattttgttttattttgtttttaggatattgataagtagtacgtgggtttcgttatattgtttaattaggtgtatcgtaagtcggtgaagaaaggttttgattttatatttatggtggttggtgagtgggttaggtttttcgggggagtggttggggttattggttagttaagttttgtcgttggagttttagatttaacgtagttttttttttgtatttgtgtgtaggtgagttaggtttggggaagtttatattggtttatagtttttttttgatagatttgtataaggatcggaagttgtttagtgttgagggtgagtggtttttaggaggttttggtattgatttttagtttttttttatgggatttttttaaggatttttttttaggtttagtttttattgttttgttttcgcggtgtgggttttttgggggtagggttaaggtattaagatggatgaggacgagggttttggttgttaagggtgaggggttgagggttggagaggtttttttagtggtttttttttcgtagagcgtattagttagacggtagagattttaaaatatacggtggatattgaggagaagggagttaagttgaagtttattatcgtggatacgtcgggattcggggacgttgttaataatatcgagtggtgagtgaggtttgttgagaaaggttttgtttaggcggttatagtattcgaggtttggttttattttttttttgtttatagttggaagtttattatcgattatgtggattagtagtttgagtagtattttcgtgatgagagcggttttaatcgaaagaatatttaagataatcgagtgtattgttgtttatattttattttttttttcgggtatgggtgtgtggttgttttggggttaggttcgggagtgtagtttttataatatggttttttggttgtgtttatgtttatttttggttgttttcggtaggttgcggttagtggatgtgggttttatgaaggtattgtatgagaaggttaatatcgtgttttttatcgttaaagttgattgttttgtttttagtgagattcggaagttgaaggagcgggtgagtttgtcgtcgtataggggtttggttagggttttggggttgagagtattagggggatttgtttggttttaaatttgatggtttttgttttattatagattcgggaggagattgataagtttgggatttatgtatattagttttttgagtgtgattcggacgaggatgaggattttaagtagtaggatcgggaattgaaggtgaatatgtagattggtggggtaggggggatggagttggtgaggggtagaattagagggttttgttttttttatattgagtttgttggaggagggttaggttagtttagttgggtgtaagagttatttgttttaggagtagaggatttgtattttttttatttagggttagaaggtaaaggttattatgtttttgtttggttggggtgggttatgtgggtttcgtgtggtgtttggtaggtatggagtatttgtttagatttagaggtgtagtagtgggttaggtttttaattttaattttttttttatgggttattagaggaaggggttgttttagtggtatattttggtttttagatttttgagttttagggttggtggttttgggtgtttcggtagttagagtgatgatggagattatgttaggggtaggtggttattagggtaggggtattagtatggggagatataggtttagttttggggagggaaggggtagttggagggggtggtttttgatgagggaggagatgaggagggagtatgtttggttgggtatagtttggaaaggttttggaatgtgagttatatgggttttggttttagttaggggtagagaggttagaaaggggtaacgttaggatttttttgaggagagatagttgatggtgatgttggaggggtgtttcgggagttatatgttcgttttttattagtaatcgtgtaattacgtttatcgggtgtgagttttttttttttttttttttaggagagcgcgtttttcgtcgttataggtagtaatacggtggtggaggttaaggggtagcgggttcggggtcgattgtatttttgggggatcgtggagggtgagtagagttttggggtattaggtttggtgggggaaggttgttttgggtcggcgttagtttattatttatttttatttcgtagtggagaattaggcgtattgcgatttcgtgaagttgcgtaatatgtttattcgtacgtatatgtacgattttaaggacgtgacgtgcgacgtgtattacgagaattatcgcgcgtattgtatttagtagatgattaggtgcgcgttttagtcgcgagttagatttcgtttttttggtttcgtttacgtttttataattgagggtcggttttgttagtttatttagatttgaattttgtattattttttaagtttttttttttttttagagtttggtttttttagaattaagtttagggttgtgagggtttcggagggtagggttttagtagtggcggggatgggttaggtatcgttagtttacgttgagtttttcggtggcgtcgtttcgtttattttttttttcgtttcgcgtagtaaattgatttaggatagtcgtatggagagttttatttcgattttgtcgttgtttatttcggacgtcgagattgagaagtttattaggatgaaggatgaggaagtatgtggggcggcgggggcggcggaggcgggcgttagggatgttttttcgcggtgttgtttattcgtcgggttgttttcgttcgtagttgaggcgtatgtaggagatgttgtagaggatgaagtagtagatgtaggattagtgacgttcgtcgcggatatatcgttcgttttcgggacgttttcgtatttttggatattagatcggattgttttcgattcggagacgcggggttatagtttttagttgattttaatttatttttagtattatttttttttaggttattgtgtttgttttcgaggggtttggatcgtagttttcgtttagttggttttttttgattttgggggattaggagcgaagttgggcgggattttagagattcgttttttttgtttttttttcgttttcggacggttatagtatttaaatcgtaggttttgttttggtaggtaggtaaagttaggtagaagaggatttttaggattttgggtttgttttttgttttagtgttgtagaacggatttgggagtttttttttgtttgttttcgcgggttatttagcgagtgttgagattttattttttgtcgaggcgggtcgagtttttttttatttttagacgtttagcgggtagggttgggttgaattaaatgggagttttttagatataaggaggttagaggttgtaaggagcggggtcgtgatcgtttatattttttttttatagttcggttcgatttggagggttttcggggtattgggcggtgagttattttttggtaattttcggtgtcgttttttgttttcgttcgaggttttttttttttagtatcgttgtggtgtgtcgggattttgagtttaggtttttcgatgtttttattcgtatgattttttttcgttatacgatgtttcgttttttttcgttgtgaatgtcgcgttttgttttggtgataggagaataatgttggtgaacgtcgtagcgggtgttcgagtgtttcgtgtgtttttgagagcgggtgggagcggaagtttgagcggtttgcggttttcggcgatagtgtgttatttgtcgttgtagcgcgcgttcgcgcggtttttgggttatttttggttaggtcgtagtattgtggtcggtgcgggcgtggtaggggcggggcggttttatcgttcggttttttcgtttacgtttttcgttgtagagtaagtcgggttgtcgttttttcgttatgggtttcggtgagtttggagttcggtcgggttttcggttgttttttaggtcgattcgggttgagaggagttttggtcgtttggttgtagttgggagagatttgggttagatttagaggggatttttagtcggcgtgcggggtggttagggtggagaggttggcgggttatcgggacgtcgggtattaggggttggatggagtcgggtcggtagtttgggtatttagagatgtcgtttaggtgttcgtcgatcgttcggtttattgcggcgttttttttgtagg

SEQ ID NO: 146 - DNA, 5312 bp, Artificial Sequence
  chemically treated genomic DNA (Homo sapiens)
tttgtaagggaagcgtcgtagtaagtcgagcggtcggcgggtatttgggcgatatttttgagtatttagattgtcggttcggttttatttagtttttgatgttcggcgtttcggtagttcgttagtttttttattttgattatttcgtacgtcggttggaagttttttttaagtttgatttaagttttttttagttgtagttaaacgattagagttttttttaattcgggtcggtttagggagtagtcgggggttcgatcggattttagatttatcggagtttatggcgagaagacggtagttcggtttattttgtagcgggaggcgtaggcgggagagtcgagcgataaggtcgtttcgtttttgttacgttcgtatcgattatagtgttgcggtttggttagaaatagtttagaggtcgcgcggacgcgcgttgtagcggtagatagtatattatcgtcggaggtcgtaggtcgtttaggttttcgtttttattcgtttttaggggtatacggagtattcggatattcgttgcgacgtttattaatattgtttttttgttattaggataggacgcggtatttataacggaagaaaacggagtatcgtgtggcgggaagggattatgcgggtgggaatatcgggaggtttaggtttaggatttcggtatattatagcggtgttggggagaagaggtttcgagcgagggtaggggacggtatcgagagttgttaggaggtggtttatcgtttagtgtttcgggggttttttaggtcgggtcgggttgtggagaaggggtgtaagcggttacgatttcgttttttgtagtttttggtttttttatgtttggagggtttttatttgatttagtttaattttgttcgttaggcgtttggggataagggaagattcggttcgtttcgatagaaaatggggttttagtattcgttgggtgattcgcgggagtaggtaaaggagggtttttaagttcgttttgtagtattggggtagggaatagatttaggattttgggaatttttttttgtttagttttgtttgtttgttagagtagggtttgcggtttgggtgttgtgatcgttcgggggcgggggaagggtaagggaggcggatttttgaagtttcgtttaatttcgtttttgattttttaaggttagagagggttagttgggcgggggttacggtttaggtttttcggaaatagatataatgatttgggagggggtggtgttgagaataaattagggttagttgggggttgtggtttcgcgttttcgggtcgggaatagttcggtttggtgtttaggggtgcgagggcgtttcggagacggacggtgtgttcgcggcgagcgttattggttttgtatttgttgttttattttttgtagtattttttgtatgcgttttagttgcgggcggagataattcggcgggtgagtagtatcgcggaggagtatttttgacgttcgttttcgtcgttttcgtcgttttatatatttttttattttttattttgataagttttttagtttcggcgttcggggtgggtagcggtaggatcgggatggggttttttatgcggttgttttgggttagtttgttgcgcggggcgggggggaggatgggcggggcggcgttatcgggaggtttagcgtgggttggcgatgtttggtttattttcgttattgttgaggttttgtttttcggagtttttatagttttggatttggttttagggagattaggttttgggggagggggggggtttagggaatggtgtaaagtttaagtttgggtgggttgataggatcggtttttagttatggagacgtgggcggggttagaggggcgaggtttggttcgcggttggggcgcgtatttggttatttgttggatgtagtgcgcgcggtagttttcgtagtgtacgtcgtacgttacgtttttgaggtcgtgtatatgcgtgcggatgagtatgttgcgtagttttacgaagtcgtaatgcgtttggttttttattgcggggtgggggtgggtagtgggttggcgtcggtttaggatagtttttttttattagatttggtattttaagattttatttattttttacgattttttaggggtatagtcggtttcggattcgttgttttttggtttttattatcgtgttgttgtttataacggcgaagggcgcgtttttttgggggaaggagggagaaaggtttatattcggtgagcgtaattgtacggttattgatgggaaacgggtatgtaattttcggggtatttttttagtattattattaattatttttttttaaagagattttggcgttgtttttttttggtttttttgtttttggttggagttagagtttatgtggtttatattttagggtttttttaggttatgtttaattaggtatgttttttttttatttttttttttattaagaattattttttttagttgttttttttttttttagggttgagtttatgtttttttatgttgatgtttttgttttggtggttatttgtttttggtatggtttttattattattttagttgtcggggtatttaaagttattaattttggagtttagaaatttgggagttagggtgtgttattggggtagtttttttttttggtgatttatgggaagagggttggggttgggggtttggtttattgttgtatttttggatttgggtaagtgttttatatttgttaagtattatacggggtttatatgatttattttagttaggtaaagatatggtgatttttattttttagttttggatgaagggggtataggttttttatttttagaataaatgatttttgtatttaattgggttgatttggtttttttttagtaggtttaatgtgaaggagataaagttttttggttttgttttttattagttttattttttttgttttattagtttgtatgtttatttttagttttcggttttgttgtttgaagtttttattttcgttcgagttatatttagggaattggtatatatggattttaaatttgttaattttttttcggatttgtggtggggtaaggattattagatttgaggttagataagtttttttggtatttttagttttagggttttggttaggtttttgtgcgacggtaggtttattcgtttttttagttttcggattttattggggataagatagttagttttggcgatgagaggtacgatgttgatttttttatgtaatgtttttatgaaatttatatttattggtcgtagtttgtcgagagtagttaagggtgggtataggtatagttagggggttatattgtaggggttgtattttcgagtttggttttaggatagttatatatttatgttcgaagggggagatgaagtataggtagtagtgtattcggttgttttggatgttttttcggttgaggtcgtttttattacggaagtattgtttaaattgttggtttatatagtcggtgatgggtttttagttgtgggtaggagggaggtgaggttaggtttcgagtgttgtggtcgtttaggtaaggttttttttagtaggttttatttattattcggtgttgttgatagcgttttcgaatttcggcgtgtttacgatggtgagttttagtttgatttttttttttttaatgtttatcgtgtgttttagaatttttatcgtttggttgatgcgttttacggggaaggggttattggaagggtttttttaatttttagttttttatttttggtagttaggattttcgtttttatttattttggtgttttggttttatttttaggggatttatatcgcgagaatagaatagtgggagttggatttgaaagggagtttttggagaggttttatggaaggggattggggattagtgttagggttttttgggggttatttatttttagtattgagtagttttcggtttttgtataagtttgttaggaagaggttgtggattagtgtggatttttttaggtttgatttatttgtatataggtatagagaaggagttgcgttaggtttggggttttaacgatagagtttggttggttagtgattttagttattttttcgaggagtttggtttatttattagttattatgagtgtgaagttaaagtttttttttatcgatttgcggtgtatttggttgggtagtgtggcgaagtttacgtattgtttgttaatgttttggggataggatggaatagggtagggatataaaggtttttttagaagtttaatattttgttttttattaaatgcggtatgaggagatagtagagggtacggtttttagggtggggtatttcgttggtaaaaataaggggagggttcgtgggtaaaagtttggagataagaaggtaggcgaggtggtggtaggagaaggtatttttggttttaattttagggagggttttgtagggatcgatattgtatttatttcgtggggagatgttaggtcgtagtaggtataggcgatgtttttttttttcgggtagagggtagtaggattgggatttttgggatatatttaaggttttttataagtcggagaagttgggggtttcgatatttattttttcggagagtgttagggggcgggaggttttatttggttcggatttagtcgcgggggcggcggtagcggcggtggcggagtagcgtttatttatagatcgcggcgtcgagtttttttcgttcgcgcgtttaggcgtttagttttcgtagatttttggggtttttggaggggttttacggtcgtatttttcgtcgcgttttggagtcgcgtgaggtgaggtttggatagggtacgtcgttttatcgtggggtcgcggatttgcgaggtcgttgcggagggaagggttgagtttaggcgttggcgggtcgtggcgcgcggggacggggattttatgtcgagtttcggagttcgcggggttatagatttacgtttcgttttttttatatacgtattttgagtcgtttttgggtttgggttcgcggcgatagtagttgttttattaggcggttttggggcgttgttagcgagtttatcgcggcgatttttttaggttcgggggtacgttcggattttaggttcggttaggtcgttagagttcggcgatagcgagggattttggcgcggttttgttttaggttgcgttgtttatttcgttttgcggacgcgggaagtgaggtttggatagggtacgtcgtttattcgggggatcgtcgattttcgaggtcgat

SEQ ID NO: 147 - DNA, 3025 bp, Artificial Sequence
  chemically treated genomic DNA (Homo sapiens)
tttttacgatttgatttttatagtcgttttatttatgggttttttataaattaggggtatagaggagtattgaaagttagtttagaggtgagcgcgcgtagttagcgtttttcgcggatatagtagtcgggtgttggagaggtttggaaagggcgtgtcggagagttaagtgttagtcgtttagggtttgtcggtcgttttttttttttttgttcggtaggggatttagcgcgtacgttagtgtggaggggcgggttggttggttagtttcgggtttttcggttatttcggggattttttttaagtttcgttttcgagtgtttttattggtttcggatttttttttttttagttgttcgtttgggtttcggggcgtttaggttattacggataaatagtttagggcgtttggtcgagaagttaggggtgaggaagttttggggcgttgtcgtcgttttttttaattataaattaggtcggataggagagggaggggtgggggatagtgggtggggatttagattgttagtattttgttatttatagtcggggttttcgagcggtagaaagtttcggttattttttgtcgtttgggttgggcgaaagttaggatcgtgtcgcgttatcgttaggatatggagttattgtcgttatcgtttcgcgacgtagatttgacggttttcgacggttttttttgtttttttgttataacggacgatttttatgacgattcgtgtttcgatttttcggatttgcgttttttcgaagatttggattcgcgtttgatgtacgtgggcgcgtttttgaaattcgaagagtattcgtattttttcgcggcggtgtattcggtttcgggcgtacgtgaggacgagtatgtgcgcgcgtttagcgggtattattaggcgggtcgttgtttattgtgggtttgtaaggcgtgtaagcgtaagattattaacgtcgatcgtcgtaaggtcgttattatgcgcgagcggcgtcgtttgagtaaagtaaatgaggtttttgagatatttaagcgttgtacgtcgagtaatttaaattagcggttgtttaaggtggagattttgcgtaacgttattcgttatatcgagggtttgtaggttttgttgcgcgattaggacgtcgcgttttttggcgtcgtagtcgttttttatgcgtcgggttcgttgttttcgggtcgcggcggcgagtattatagcggcgatttcgacgcgtttagttcgcgttttaattgtttcgacggtatggtaaggtcgggattttaggaagtgaggaagttagggcggcgttcgggatattagggacgcgttttcgagggcggggagttggttttgcgggaggtttgggttaggatttttttcgagagagaggatttttttgttttgggtagttgttattggggtagtttgttttggaagtgtgcgggtaagcgttcgagttgttttattgggggcgttattagaatattgtagcgcgaacgtgaagatttttttttttatttatttttatttttaaaatgtaaatttgcgttttttggtgattgttcgtttttggtttggttttgtatgttgtagattttattttttatttattcgtaattatttttttaattaggataggtttgggttcggaattagagttttaggttagagttagggagggggcggttataggaattggtgttcgggtttcgagtcgtttcgcgggtttgatttagtcgtttttgttgtttgtagatggattatagcggtttttcgagcggcgttcggcggcggaattgttacgaaggcgtttattataacgaggcgtttagcggtgggtatttcgggtttttttttgttcgtttttttttttttatggagttgttttggtttttatttaggacgtttttatttttatttatatacgtttatgttttgggaagtggtgtaggagatgaaatattaagtaagtagttttttgttttttcgattgtttcggattttaattaaagtttttagtttttaatttgttttaaagtattgggttcgggggtgggaggtttgtcgcggttttatttttgtttattaatcgagtttttttcgcgtagaatttaggttcgggaagagtgcggcggtgtcgagtttagattgtttgtttagtatcgtggagcgtatttttatcgagagttttgcggcgttcgtttttttgttggcggacgtgttttttgagtcgttttcgcgtaggtaagaggttgtcgtttttagcgagggagagagtagcggcgattttatttagttatcggacgtcgtttcgtagtgttttgcgggtgcgaattttaattcgatatattaggtgttttgaggggatggtggtcgtttattcgttcgagggatggtgtttttagggtttttcgcgtttaaaagattgaatttaaatgttttttttttaatagcgttttaaaagcgattttttttgaggtaggagaggcgggagaattgaagttttcgttttcgttttatagggtaaggatatagcgcggttttttttacgtagtatttttttcggagatttattgcgatggtcgtttcgtgtttttcggtgggttagagttgaattttgaggggttaggtttagttttttcgcgtttttttttatgggggtgagattttcgtagatttaattttgtttcgggatgtatcggttatttgggggggcgtgagatttagtgtatttcggttttaaatgtagtaggtgtaatcgtaatttatttttaattcgtttttcggtttaggattattttttgtaatatttttgtaatttatttttgtaaataagagttgttttgttagagtaggagtttttggggttgtatttatttttgaggtatggtgtgtggtgttatagggaatttgtacgtttatatcgtaggcgggcgagtcgcgggcgttcgtttaggtgattaaaataaaggcgttaatttatatcgtcgtggtttcggttttttttggatatgggtgtgggattt

SEQ ID NO: 148 - DNA, 3025 bp, Artificial Sequence
  chemically treated genomic DNA (Homo sapiens)
ggattttatatttatgtttagggaaagtcggagttacggcggtataaattagcgtttttattttgattatttgagcgagcgttcgcggttcgttcgtttgcggtataaacgtataaattttttgtagtattatatattatgttttagagataaatatagttttaggggtttttgttttggtaaagtaatttttatttataggaatagattataaaagtattataaaaagtggttttgaatcgggaaacgggttgggggtgggttacggttatatttgttatatttgggatcggagtgtattgggttttacgtttttttaaataatcggtgtatttcggggtagggttaggtttgcgagggttttatttttatgggggagggcgcgagaaagttgaatttagttttttaaggtttagttttggtttatcgaggaatacggagcggttatcgtaatgggttttcgagaagggtgttgcgtggaaaaaatcgcgttgtgtttttgttttgtggggcgggggcggaaattttagttttttcgttttttttattttaagagaagtcgtttttaaagcgttgttgggaggggggtatttaagtttaattttttgggcgcgagggattttaggggtattatttttcgggcgggtgggcggttattatttttttagagtatttggtatatcgggttggggttcgtattcgtagggtattgcggggcggcgttcggtgattgggtggggtcgtcgttgttttttttttcgttgggggcggtagttttttgtttgcgcggaggcgatttagaaggtacgttcgttagtaggagggcgggcgtcgtagggttttcggtggagatgcgttttacgatgttggataggtagtttaggttcgatatcgtcgtatttttttcgggtttgggttttgcgcggggagggttcggttagtaagtaggggtggggtcgcgataagttttttattttcgggtttagtattttgagatagattggaaattgaggattttagttagagttcgggataatcgaaaagatagggagttatttgtttagtattttattttttgtattattttttaggatataggcgtgtgtgagtgggggtgggagcgttttagatagaggttaggatagttttatgaaggaggaggagcgagtagggagaggttcggaatatttatcgttgggcgtttcgttgtagtaggcgttttcgtagtagtttcgtcgtcgggcgtcgttcggggggtcgttgtagtttatttgtaaatagtaagggcgattgagttaggttcgcgggacggttcgaggttcgaatattaatttttgtagtcgttttttttttaattttagtttaaggttttagtttcgggtttagatttgttttggttgggggggtaattacgggtgggtaggagatgaggtttgtaatatgtagggttaaattaagggcggatagttattaaggggcgtaaatttatattttggaagtagggataagtagagaaaaagatttttacgttcgcgttgtagtgttttaatagcgtttttaatggggtagttcgaacgtttgttcgtatatttttaaaataggttattttagtgatagttgtttaggataagggggttttttttttcgggaaggattttggtttaaatttttcgtaaggttagtttttcgttttcggaaacgcgtttttgatatttcgagcgtcgttttaatttttttattttttggggtttcggttttattatgtcgtcggagtagttggagcgcgggttggacgcgtcggagtcgtcgttgtagtgttcgtcgtcgcggttcgggggtagcgggttcggcgtatagaaggcggttgcggcgttagggggcgcggcgttttggtcgcgtagtagagtttgtaggttttcgatatagcggatggcgttgcgtaggatttttattttgggtaatcgttggtttggattgttcgacgtgtagcgtttgagtgttttaaaggttttatttattttgtttaggcggcgtcgttcgcgtatggtggcggttttgcggcggtcggcgttggtggttttgcgtttgtacgttttgtaggtttatagtaggtagcggttcgtttggtggtgttcgttgggcgcgcgtatatgttcgtttttacgtgcgttcggggtcgggtgtatcgtcgcggggaagtgcgagtgtttttcgggttttaggagcgcgtttacgtgtattaggcgcgggtttaggttttcgaagaagcgtaggttcggggagtcgaaatacgggtcgttatagaagtcgttcgttgtggtaaaggagtagagagagtcgtcgggggtcgttaggtttacgtcgcggagcggtggcgatagtagttttatattttggcggtggcgcggtacggttttggttttcgtttaatttaagcggtagagagtggtcggaattttttgtcgttcgggagtttcggttgtagatagtaaagtgttggtagtttgaatttttatttattgttttttattttttttttttttgttcggtttgatttgtggttaaggaaagcggcggtagcgttttagggtttttttatttttagtttttcggttaggcgttttgggttatttattcgtagtagtttaaacgtttcggagtttaggcgggtagttgggggagggggagttcgaggttaataggaatattcgggggcggggtttggggggggttttcggggtggtcgaggggttcgagattggttagttagttcgtttttttatattggcgtgcgcgttaggttttttatcgggtagggagggagggagcgatcggtaagttttaggcggttgatatttggtttttcggtacgttttttttaaatttttttaatattcgattgttgtattcgcgggaaacgttggttgcgcgcgtttatttttgagttgatttttaatatttttttgtatttttgatttgtgggggatttatgggtagagcggttgtagaaattaggtcgtgagag

SEQ ID NO: 149 - DNA, 11913 bp, Artificial Sequence
  chemically treated genomic DNA (Homo sapiens)
taaagtagggtgttattaaagaaagaaggaagaaattggttaaacgaatttagaatataaataaaattattgtataaataaaatttttgtttacgattaagttggaatggcggttaaaaaagaaaagggaaaaaaaatttttagatgtaggtagatttttataattaagttattttttaaaggggaagtaaatgtgatagaatatttagtaagtaaatttattgaggaatattttgtttttatataattaaatttaatattgaggtaaaattgataattattaaattgagggtagttgggagagggaaaggggatgagataaaatttagtttataaaatattttattattttttataggttaaaaaatataaaagaaatatttggaaagaattgtttaagacggaaagattttaagattgtgtgattttttttttttttttttttttttttttttttttataggtgtagaataattttttttttttttttcgtggttttttttttttttattttttttttttgttgtttgtaaagttgaatttggggttaggagttttaattgtaattttagattggaattttagatggtgcgtttaggattggaagtaatttttagtttattaattttatgggtttacgtatttgttttggttacggtttggtttttatttttattgtggtattaatgtagaataaattgagatatattttttatataattagttttagaatttaaaaagatttacggtataataatagaggtagtgtcgcggaatttttttattgaggattttcggggagttcggggattatttcgcggtggtattagaatagacgagtaattttagcggttttaggtattgcgaattgggggagagggggaaattttgtatcgtattcggtagtatttaacggtttcgggtttttagatagggttagcgaggagagttaggatagtaagtggggattggttaaaaaaaatcgatttaattttgaaatgattagaagaagttgggagtagttattataaagttttttttttgtttttttttttttttaattgaaggaatgacgttgaaatttttatcgttagcgcggggttgggaattattttaaatatttgttttgtagtttcgagtgggtagatttcgaagagttggagtcggcggggaggggaggaatagttgttgggttgttttgcgcgtggggttcggggcgcgggtttcggggagaggcgttagtcgaaagtttgtttttttttcgcgataggtagtagcgaggtcgagttattttttattacggtttgcgggtttcgcgcgtagtgtggttgttttcgtttttgatcgatcgtagcgttttggggtgtttatttagttgttcgcggtcgttgggtgattttcggagggcggtttaggcgtgcgtattggtttttggggttgcggttgtagtagtttagtttcgcgttttgttagatgtagtggatagcgtcggggtgaaagtaagggttgagaaatttttattgttttgtttttatttagtttcgatttttttatattgtaataattatgtattttcgaggtcgggatgtttgcgttttgttagtgtattaacgttatatggttttttaggggttgttttcgtttttgtattttattagttttgaagaggtagaggggtggtgggtaaaatttttaattggacgttgagagattcgggttttagttcggcgttgttattaatttgttttttgtttttaaatagtagtagtaataaaaattgtaaagttgattgagttaaaggtttatattgtttttttatttaatttttagaataattttatgaggtgggcgttagtattttattatttcgtttgattagtaaggaaattgaggtttagagagattgcggaattcgtttagggttatatagttgttggttatttggtagagttgaggttttattttggggttattaattttttgttttttatcgttgcgttttatagattgtttttttttcggttgtttgggttttagtttttttttttgtaaaacgagaagtttaatttgtagttttttttgttaatcggtggtttagattaggaatttttgttatagatttcggcgttgataggggtaagaaggtgggtgaaagaagggggcgtttagttttttatagtttgtttttttttgggatttcgcgaagggcgggtttcgcgagttaaaggaggtataggagagcgtttatcgttcgcggcgggtgaaggtgttatttgttttcgtgttaggttgtgagttttggtgtttagtttagggcgttaaggttagtgtagttggtatgttttttttggaaaattttaggtttttcgtagagaacgttatttataataaagaagaggatagagaggtatggagcgttttgcgattgtaggagtacgttagttttttagcgttggtttagtgtcgtttgggttttcgggtatgtggattcgttggggtcgtacggagattttttgtcgggtttttggggtttttcgattgcggttttttagtttagtattttttttttggtttcgtaggttgtagggaattttttttatttttttagtcggagaagtttaagtcgggcgagggggtatttcggggttcgtatcggtgtttttttttttttcgtttttataaggattttgagaaaataaatggtagaggagagaggagttttatatttgtttggtttttttttttttttatttatttttatattttttatttcggggtaaaaatttatttttgaaaaatgttggtagagatttacgtgtttttgttttatttgggttttataaatataacgatttatatttaagttagtttttttttagataatttttttttttttcgttaaaagtgttaaggatggtaaaagaagaaataattttaattttttcgtttggaaatgaaagttttcggttttttataaagggtttttcgttttttatagttgagttttagttaagaaaaacgatttttaagtagaaataataggcggggagaaggaagggagatatagggatttggggggtttttagggtaattggtagtgaattttgtttcgagagttttttttttatttaaaaaattaaacgcgcgagtttcgcgaaaggtttagggatagatcgtgtgggagaggattgagtagagagcgtgggggtagtgttttgtagaatttttttttttttaataataattttaaaagtttttgagtggagacgacgtaaagttaagtagtaaaggtggtttgggaggtaagcggagggtttaagtgtcgtatttttatttttagggttttttgcgtttacgggatgcgtatttttaagaagtgcgtttttcgagtaagttttgggttcgtatatatttcgggttcgtagttagaatttaatggcgataacgtttatgtaatgtaagttaaaaattaaagcgtaaaaaattattatgttatttattgaaacgttattttttgttaaattgtaattattttgttttatataagtttggttggaaagtttgtagttttagttcgggttagttaggtataggaggtcggattgtaatcggttgtttttttttcgtcgcgtttggtcgttttacgttgcgtcgtcgttgttgttttttggcgtttttgggattttatacgtatttttgaaatacgtttcgtttcggttttcggtttttttttttgtttaggggttgttttttaatagatattgatttttttagaagatttaaaaattaaattaaaatattttttattcgttttaaatatttgttttggggcgcgggggttgttaaatagagattagacgaagggagttagatttagcgaagtttttcgagtttttaaagattcgaatattaattcgcgttcgtgggtcgatggaggttttttttattttattttttggtttttttaattggttttcgttttttggttaattattgagtaattagaatggtattttcgattagggttataggtagtgttcggcggagtggttttaggagttattcgttttttgtcgggtttcgtatttaaatttttttttttattttttttttttaaattgggcgttaggatgtttcggtcggaatatacgtaggttttgggcgtttgtttaagggttttttttttttttaaattagtcgttgttttttcggtttaatcgtagaagaattagatattttttattggaaagggaaattaagtgttgttgattttaattttaggtaggcggtaatcgtttttcgtttggcgtaaattttattaagtaaataattattagtcgatcgaaatacgttcggtttataattggtgtaattttcggttatttaattgagggacgttcgtttttagtttcgatttttggaatttataaagggttatttttttttttagtgattttaagattatggttatttttttattcgatagttttagaagtaagagttagatttaagggtgtaaagtaagggtatacgtttttttgaagtttgattgagttttttttgcgtttttttgaagttttcgtttttttggagtttatttgtttttttttttaaattatttttttagattaataattttatttttatttttatcgtattcgattttgttcggatttattgtttatttgaacggattttttagtgagacgaggtttttatattggcgaaggttaagaaggggaggtggggggagggttgtgttatatcggttagttgagagcgcgtgttgggttgaagaggagggtgttttcgagagggacgttttttcggattcgtttttattttagttgcgagggcgtttttaaggagtagcgcgcgttgtttggtcgggtttgggttgttgagtgaatggagcggtcgagttttttggttttttttttttttcgcgtcgtcggttttttttatttgagttttgggaagttgagggtagttaggtagttggggtaaggagtttaaggtagcgtttatattcgggggtttttcgtaattcgatcgtttgttcgtttttttatttttcgtttttttttttatttatttatttatttatttatttatttagagtcgggacggtagtttaggcgttcgggtttcgtcgttttttcgtcgcgattttggatttttttttgttgtaggattcggtttttacgtgtgtttcggagtcggcgttttagtatacgtttcgtttcgggtttgggtgtttatagtagttagagtagtagggagttcgggattcgggcggtatttgggttaagttaggcgtcgtcgaggttagcgttgaacgtttttagggtcggaggagtcgcggggcgttcgggtttgagtcgtagtaaatgggtttcgacgtgcgggatttgaacgcgttgttgttcgtcgttttttttttgggtggcggcggcggttgtgttttgtttgtgagcggcgcggcgtagtgggcgtcggtgttggattttgcgttttcgggcgtttcggtttacgggtcgttgggcggtttcgcgtcgttatcggtttcgtcgttattttcgtcgtcgtcgttttatttttttattaaataggagtcgagttggggcggcgcggagtcgtacgaggagtagtgtttgagcgtttttattgtttattttttcggttagtttattggtatagtcggagtttgtcgttacgggtttttcggttttttttcgtttagttaggcgttattcggttaggttaggatgttttttaacgcgttttatttgtttagttgtttcgagagttagttcgttattcgtaattagggtaagtaggtcggggagcgttttttacgcgcggggtagtggcgttagggatttttcgttttaggatattttttttttttattttttttgatcgtagtttttatttagttgttttttaagggtcgtgaggatagcggaagcggcggttggggaggaggtcggagagtgggagtgtacgtaggtattggttttcgatattttttaaagttaggtagagttaggagtttgattgttcgtaagagtcgggagggcgtttggggttttttagagttcgagagatttcgggattgttagtttttacgggagtggaattaggagatcggcgtagtgtttggttttgttttggggagagttttgttaattaaggaaacgttaaattgttattaagcgtagcgttttttagacgtttggattttggattcggagtgggattagcgcgggggtgagcgtttgtgttgtgttgttttcgtagcgttaaaatgtttaggagtatttttagtttttataatacggtgttggtatatatttaggtgtatattaagtatcgtagagaattagaatgagtatatgtatttttagtaattaaatggttttttggaatagcgtcgtgttcgtggatagttttcgcgtatggtaatatagaagtggatttttattgggtttcgtttaggcggcggttacgtaggttttggggatggaagagaatttgatttattcgagtttaagttatgcgggattaggttttatcgtaggtagtggaaggaggtacgagttttggttttttttttagcgtatttggggcgtttttttattttgtaaacgcggggtttagttgggatagtatttttttaagatttggggttagaataaggatagggttattcgttgtgtttagttaggatataaggagggaattcggtatacgataagtattaggttggttttttatttcgcgtcgatgttcgtttatttttttttcgtttgggcggcgcggattcgaatttgcggagtttttgtagtttgttttttttatttatttttagtggatttttacgttattgagaatttaagttagttcggtttgattcggtaatttagtaaacgttttattaatataatggcggatgttttttttggagtaaaattattcgagggtttagggatcgggatgtttttggaatgcgtgggaagtagagtgtattttttgtaggaggtattttcgtttaaggttcgggagaagggttttgtttttgttgttcgtttttattcgcgttttttaaacgcgcgtttttaggtcgtttttattttagtttaattaggagtattcggttttcgcgaagttttggagaaatcgaaatcgttttttttttcgggagaatttgggattattgttttgtggaggaatcgtaagtagatttaagggttgtttttattttatgtttttagttagtgaaattagtgttttgtatttaaggggcgttgggataatttattggtcgttgaggtttgtgttttttgattagatcgcgttatttttgtttagtaggttggtgttatttttggggagtttttaggttttagtgttttcgtttataagaggatagttgagatgggtaatttggagattgggttcggtttgaagttatattttatagatgtagaagcgttatttattatttttttggggttttaaatatggaattcggtaatttatttaaatatttgtgattgagaaataatgaattcgagagtattgtttgtatgtgtgttatttggaggcggttgagaaattatcgaatttatgtttttggggtataaaatattattacgttattatttttttagtatttttaggggatttttgaaatttgggttttgtcgtttcgtttgggttttttgtttagttttttttagggtaggtttggtgtttgggattttattatatgtcgtggggggtgggattgtgggttttgtagttagtaggtattatatttttggaaaatatttggatttttttgtaatatataggcgtggttgttatggagaaaaagttaaaaggggattaggattagtaggtgaatgtattttttttttttattttggagaaaaagtttaatggagagagggttttagatttaagttatatagtttggaagtattatttttaggtttaagttttgttttgtagtgaaaatagatgggtttattttatttagtttttgaggtttattgggtagtttggatgtgagaagcgtttcggttgttattttggagtgggtaagggtggttttcgagattttgggtttattttttggatttttagggtttttgttgtttttttaggaatgtagggtttggtttaagatttgggttgtgagaggtaagggtattaatttttaaaaatgtggaaatggttattagagcgttaaggttaaattttaggggagaggaattaaggtcgtttttggatttttagggtagtttagttatggtgtataggtaggggtaattgttggtatttatttataatcgtttaaaattttataagtatgtttatattttaaatttttaaatattatattttgtattttaattttgtaaatattaatttagtaaatattaatcgtttatttggttaggtattgggttttgaatattaattaagataatggtttcgagaatttttgtaagaagtttattagttaattttggagaggttttttgttttggatgaggaaatttaggttttatgagattaggtggtagaggtgggatttgaatttagattatgttagggtgtttttattttttttttagggattttggttttatcgttgagatggattttttttggtttgcgggaggggtattaaatttttagtttatgtgtgggggttgacgggtttgtgagggtagatgtggggtgaggatttgagtagttttagattagatgtaaggtttaaggaggaggggaaaaaagtttgtttgggtcggacgcggtggttcgaggcggttggattatttgaggttaggagtttgagattagtttggttaatacggtgaaattttgtttttattgaaaatataaaaaaaaaaattggtcgggtttggtgacgggcgtttataattttagttattcgggaggttgaggtataagaatcgtttgaattcgggaggttgaggttgaagtgagttgagatcgcgttattgtattgtagtttgggcgatagagcgaaatttcgtttcggaaaaaaaaaaaaaaaaaagaggttgtttgttagtttattgatttcgtagtttcgtaggttcgtagaattttaaggtatgattaggtttgggattattaggttattttagggttaggtgcggaggtttgcgacgttcgagggttaaaggttttttttttcggttatataggagagggtattttgttgggggataggttttttttaattatagtgtagttgtagttatcgtttttagttttttgagtatttttttggttgagtttgttgtttattttattttttagtttttacggttcggttaggttaggcggttttcggtttttttgtagtcgtcggcgggggaggagggtatagagcgcgtttcgttttttagcgtacggttaaggttgcgtttttttttcgggtcgggattaatcgtgggaaaggcgttattttggttattcgattttttttttttaaggtttgtataaggagtttttgaatacgttgttttttttagtcggtagttttattttttttggtttttgttttcgtatttttcgcgttaggttaagcgttgggtttagggatagcgcgttttaattaaattcgtgttcgataagtttttaattaaaagagattttttttcgtttcgtaggcgtttttattattgtttttttcggggggatttgaaggagagggtttgaggtcggtttttgttcgtcgaggtttgcgtgttcggtttgggaggaggtttaggagggttcgcgggttacgggtatttttgggttcgagttttggggtgcggacggacgtttcgagagtgggtgtcgcgattcgggatttacggttttcgtcgggtacggatagttgcggagtagggttttgaggattgtgtagtgttttgggtttttgtttatttttgggtttaggaatggagaagggttcgtttagagaaaattttttcgtagtttttatttcgtttttttttttttttttttttttttttttttttttttttttttttttttttttttttttgtgtttgtttttttttttttttttttttttttagtgtttttttagaaattcggtttttatttcgggtaatagtgggtgttttgagttaaatttcgtttgtaagtttatttataggttttaaagaaggttaggttttaggttttaaaaggaagtttgtggaagtttaaacgtgttcgtttatgtaggagagttaacggggtcgggggttatttttgtttatttagtaggagagaaatggaggttttcgaggttatatgataaaagttagtggttttttaaatttttagtgtgtggtgttgagtagtgtgtgagatttaagtttggatttgtattattcgggagttaggatttgtttttttttttttttttttgtattttgttatattattttttaggtttatgtttttgttgttttagagaagttttttttttttttttttttttttttttttttttgggcggggggtggtggtgtgtgtgtatgagcgttcgtgtgtgtttcgaaaatggaggtaacgatgttttgggttttgtttatcggttgagttttgtttaagtttttggaggtattttggttaaatagtgtaagagtgggagaatgggtgttgtttgatttaatttatttttgagaattttgtgaagtttggagatttagggtagttttgggttaggaggatttgaggttgttggggtggttttgttaggattttataggagtagttttttttagttattgtgtttggattttaggttatagatttcggaatttgtagaggaatgagattttatttttgggtttcggggttaatgacgtatttttagtcgaaggatttttttttttagaggtagtaatagttttttagaagtttgtggggtataagtttaaagtaatttaataataaaaattataaaagattatgttttttaattgaggttttacgtttttttttttattttgggggggggggggaatgttaggatttttttagggggaaattgaggtaaaggatcgaagtattattatggagggaaagggagatatagtgttaggtatattttaaaggaaattggttgtttagtttggggagtgaggaagttggtttttatagtagtggttagggtcggatttttgggcgtaaggtgggttttataggggggaggaggaggagagcgtagggtcgttatttgaaggtttaattggaaggggtttttgtttttttttttattagtttttttttgggtgttatggtgttaggtcgggtagttttagatagataatattattcggtaattattttttttatttttaagattaggttatttaattggtttcgagtaattaatgaaagttggtgcgcgggtttttgatttatagttcggagttaacgcggggttagtttagtagatttatttcgtttgttcgcgttgtttttgcggaagagttgtagtttatttttggggggtgaataattttttttgtcgattaggtaacgagttttatatttaatttgttaggggttcgttgtagaagcggtagagatcgtagaagattgcggtataaataaattgggaaaaagcgaggtgggggttttagttagaaaaggatggagaagtttgttttaaggttatatttagggatttgggtcgtttttttgtcgaaagttttggaggtttgtggggttggattttttttcgttgggggttcgaatgcggggtttagcgtatatttttttcgttcgtggttggtttagatttattgtttcgttttgcgagagtatcgttgatattgtgttttttttcgtcgttttcgtagg

SEQ ID NO: 150 - DNA, 11913 bp, Artificial Sequence
  chemically treated genomic DNA (Homo sapiens)
tttgcgggagcggcggagagaagtatagtgttagcggtgttttcgtaagacggggtagtgggtttgaattagttacgggcggggggggtgtgcgttgaatttcgtattcggatttttagcggaggagaatttagttttataagtttttaggattttcggtaggaagacggtttaagtttttggatgtgattttgggataggtttttttatttttttttgattaaaatttttatttcgtttttttttaatttatttatgtcgtagttttttacggtttttgtcgtttttgtagcgaatttttggtaaattaagtataaaattcgttgtttgatcgatagagaaggttgtttattttttaaaaataaattgtagttttttcgtaggagtagcgcgggtaagcgaaatgaatttgttgggttaatttcgcgttgatttcgagttgtaaattaggggttcgcgtattaatttttattaattattcggagttagttaaatggtttggttttaaaaatgggaagagtaattatcgagtaatgttatttgtttggggttattcgatttgatattatgatatttaagggaaagttggtgagggggaaaataagggttttttttagttgggtttttagatggcgattttgcgttttttttttttttttttttatgggatttattttgcgtttaggggttcgattttgattattgttgtaggagttaatttttttattttttaggttggataattaattttttttagagtgtgtttgatattgtatttttttttttttttatggtagtgtttcggttttttgttttagtttttttttagggaaattttagtatttttttttttttttaaagtgagaaaaagagcgtggagttttagttggaaaatatagttttttataatttttgttattaaattgttttaaatttatattttataagtttttggaaagttgttgttgtttttggggaaaaggatttttcggttaaagatacgttattggtttcggaatttaaggatggggttttatttttttataagtttcggagtttgtggtttgaagtttagatataatggttaaggagagttgtttttatgggattttggtagggttattttagtagttttagatttttttggtttaggattgttttgggtttttaaattttataaaatttttaggagtaaattgggttaaatagtatttatttttttatttttgtattatttgattaaagtgtttttaaagatttaagtaggatttagtcgatgagtaggatttagggtatcgttatttttattttcgaaatatatacggacgtttatgtatatatattattatttttcgtttagaaaaaaaaaaaaagaaaaagaaaaaaaaaaagtttttttggggtaatagaggtatgagtttggagggtggtgtggtagagtgtaagggagggaaggagggggtaaattttaattttcggatagtataggtttaggtttaagttttatatattgtttagtattatatattggggatttgagaagttattagtttttattatatgatttcgagggtttttattttttttttgttaagtgggtaaagataattttcggtttcgttagtttttttgtatgggcgagtacgtttgggtttttatagatttttttttgaaatttgaggtttggttttttttgaggtttatagatgagtttataaacgaaatttggtttagggtatttattattgttcggagtgaaggtcgaatttttgaaaggatattaaaaagagagagagagaaagagagatagatatagagagagagagagagagggagggagagagagagagagagagagagagagagagagagacgaaatagaagttacgaagaagttttttttagacgaatttttttttatttttgagtttaggagtaggtagggatttagggtattgtataatttttagagttttgtttcgtaattgttcgtgttcggcgagggtcgtgggtttcgagtcgcggtatttattttcgagacgttcgttcgtattttagaattcgggtttaaggatgttcgtggttcgcgagtttttttaggtttttttttagatcggatacgtagatttcggcgggtaaagatcggttttaaatttttttttttaggttttttcgggaggggtagtggtgaaagcgtttgcggagcggagggaggttttttttaattagaagtttatcggatacgggtttgattagagcgcgttgtttttgggtttagcgtttggtttggcgcggagagtgcgggggtaggggttaggggaggtaaagttgtcggttggaaggagtagcgtgtttaaaggttttttgtataggttttggagggagagaatcgagtggttaaggtagcgttttttttacggttagtttcggttcgggaggggagcgtaattttgatcgtgcgttaagaggcgagacgcgttttgtgtttttttttttcgtcggcggttgtagagaagtcgggaatcgtttggtttggtcgggtcgtgagagttgaggggtgaaatggatagtaggtttagttaggaaggtgtttagaaggttgaaaacgatgattgtagttgtattgtgattggggaaaatttgttttttaataaaatatttttttttgtgtgatcggaagagggagtttttggttttcgggcgtcgtaggttttcgtatttgattttagggtggtttgatgattttaggtttaattatgttttagggttttgcgagtttgcggggttgcgggattagtggattagtaggtaatttttttttttttttttttttttcgagacggagtttcgttttgtcgtttaggttgtagtgtagtggcgcgattttagtttattttaattttagtttttcgggtttaaacgatttttgtgttttagtttttcgagtagttgggattataggcgttcgttattaagttcggttaatttttttttttgtatttttagtagagatagggttttatcgtgttggttaggttggttttaaatttttgattttaggtgatttaatcgtttcgagttatcgcgttcggtttaagtaagtttttttttttttttttttaagttttgtatttagtttggggttatttaagtttttattttatatttgtttttataaattcgttaatttttatatatggattaagagtttggtgtttttttcgtaggttagaagaaatttattttaacggtggggttaagatttttggaaaaggagtagaaatattttagtatggtttgggtttaaattttatttttgttatttaattttatagaatttggatttttttatttaaaataaggggtttttttaggattagttggtgagttttttgtaaaggttttcgaggttattgttttaattaatatttagaatttagtgtttgattaagtaggcgattgatgtttgttaaattaatgtttataagattaggatgtaagatataatatttaagaatttaaaatatgaatatgtttgtgaagttttgggcggttgtgagtgggtattaataattgtttttgtttgtgtattatggttagattgttttagggatttagagacggttttgattttttttttttggggtttggttttggcgttttgatggttatttttatatttttgagagttgatgtttttgttttttatagtttaagttttgggttaggttttgtatttttggggaagtagtaggaattttggaaatttaaagaataaatttagaatttcgagggttatttttgtttattttaggatagtagtcggagcgttttttatatttaagttgtttaatgagttttaagggttgggtaagatggatttatttgtttttattgtaagataaaatttaaatttggagatggtgtttttaggttatatgatttgaatttagggttttttttttattgggttttttttttagggtggagaagaaggatatatttatttattagttttggtttttttttaattttttttttatggtagttacgtttgtatattatagaagaatttagatattttttagaagtgtaatgtttgttggttgtaaaatttatagttttattttttacgatatgtgataagattttaggtattagatttgttttgaaaagggttggataagggatttaaacgaagcgatagaatttaggttttaaaaattttttagaagtattaaaaagataatggcgtagtagtattttgtgttttaggggtatggattcgatggttttttaatcgtttttaaatagtatatatgtagatagtgttttcggatttattgttttttagttatagatgtttagatgggttgtcgagttttatatttaaagttttaagagggtggtgggtagcgtttttgtatttatggagtataattttaagtcggatttaatttttaggttgtttattttagttgtttttttatagacggggatattgagatttagaaattttttaaaagtaatattagtttgttaaataaaggtggcgcgatttgattaaagaatataagttttagcgattagtaagttgttttaacgttttttgagtataaaatattaattttattaattaaaagtatagagtggaggtaatttttgggtttgtttgcggtttttttataggatagtgattttagattttttcgaagaaaagggcggtttcgatttttttaaggtttcgcgggggtcgggtgtttttggttaggttaaggtaggagcggtttgaagacgcgcgtttagaaggcgcgggtgaaggcgggtaataagggtagagtttttttttcgagttttgggcgaaggtattttttgtaaaagatatattttgttttttacgtattttaaaaatatttcggtttttaggttttcgagtaattttgttttaggaaaagtattcgttattgtattagtaaagcgtttattaaattatcgaattaaatcgaattggtttaggtttttaatagcgtggaaatttattgaaaataaatgaagagggtaaattataggggtttcgtaggttcgggttcgcgtcgtttaggcgaaagagaggtgggcgggtatcggcgcgggatgagaaattaatttgatatttatcgtgtgtcgagttttttttttgtattttgattaagtatagcgaataattttgtttttgttttaattttaggttttgaagaaatattgttttagttgagtttcgcgtttataagatgaagaggcgttttagatgcgttgaaagaaaggttaaagttcgtgtttttttttattgtttgcggtagaatttggtttcgtatagtttggattcggataagttaagtttttttttatttttagaatttgcgtggtcgtcgtttgagcgaagtttagtgaagatttatttttgtattattatacgcgggagttatttacggatacgacgttgttttagaaagttatttagttattggaggtgtatgtgtttattttagttttttacgatatttaatgtgtatttaagtgtgtgttaatatcgtattataagggttggaggtgtttttggatattttagcgttgcggaggtagtatagtataggcgtttattttcgcgttggttttatttcgaatttagagtttagacgtttgaaaagcgttacgtttggtgataatttggcgtttttttaattaataaaattttttttaaggtagagttagatattgcgtcggttttttggttttattttcgtggggattagtagtttcggaatttttcggattttaaggggttttagacgttttttcggtttttgcgaatagttaggtttttagttttgtttggttttggaggatgtcgggggttagtgtttgcgtgtatttttatttttcggttttttttttagtcgtcgttttcgttatttttacggtttttgggaagtagttgggtaagagttgcggttaaaaggggtaggagaggggggtgttttagagcggagagtttttggcgttattgtttcgcgcgtagggggcgtttttcggtttatttattttgattgcgaatagcgggttggttttcgaggtagttgggtaggtagggcgcgttaggaaatattttggtttggtcggatgacgtttggttgggcggaggaggatcgaagggttcgtagcgataggtttcggttgtgttagtgaattggtcggaaaagtggatagtgaaggcgtttaggtattgtttttcgtgcggtttcgcgtcgttttagttcggtttttgtttgatgaaggagtgaggcggcggcggcgggggtggcggcggagtcggtggcggcgcggggtcgtttaacgattcgtaagtcgaagcgttcgggggcgtaaagtttagtatcggcgtttattgcgtcgcgtcgtttataggtagggtatagtcgtcgtcgttatttagggaggggacggcgggtagtagcgcgtttaggtttcgtacgtcggagtttatttgttgcggtttagattcggacgtttcgcggttttttcggttttggagacgtttagcgttggtttcggcggcgtttaatttggtttagatgtcgttcgggtttcggattttttgttgttttggttgttgtaggtatttaggttcggagcggagcgtgtgttgagacgtcggtttcgggatatacgtggaagtcgggttttgtagtaagaggaagtttaggatcgcggcgaggagacggcggggttcgggcgtttgggttgtcgtttcggttttgggtgggtgggtgggtgaatgagtaggtgggagggagggcgggaagtgggggagcggataggcggtcgggttgcggagagttttcgggtgtgggcgttgttttgaattttttattttagttgtttggttgtttttagttttttaaagtttaaataagaggggtcggcggcgcggggaagaggaggagttaggaggttcggtcgttttatttatttagtagtttaagttcggttaggtagcgcgcgttgttttttgggggcgttttcgtagttggggtgagggcgggttcgagggagcgtttttttcggagatatttttttttttaatttaatacgcgtttttagttggtcggtgtggtataattttttttttattttttttttttggttttcgttagtgtgggagtttcgttttattggagagttcgtttaggtaagtagtgagttcgggtagggtcgaatgcggtgggagtagagatggggttgttaatttaaaagagtggtttggagggaggggtaggtaggttttaagagggcgggaattttaggaaagcgtagaaagaatttagttaagttttaaagaagcgtatatttttgttttgtatttttgagtttggtttttgtttttagaattgtcgggtaggggagtggttatgattttggggttattggggaaagaggtggttttttgtgggttttagaggtcgggattgaaagcgaacgttttttagttgggtggtcgggagttgtattagttataagtcgggcgtatttcgatcggttagtagttgtttatttggtgaggtttgcgttaggcggaaggcggttgtcgtttatttaaaattggagttagtagtatttagtttttttttttagtgaggaatatttaatttttttacggttaagtcgggaaaatagcggttagtttaggagggaagaaaatttttgggtaaacgtttaaagtttgcgtatatttcggtcggagtattttggcgtttagtttggggaggaggggtgaaggggagggtttggatacgaagttcggtagggagcgggtaatttttggagttatttcgtcgagtattgtttgtggttttggtcgaggatattattttggttgtttagtgattgattaggaggcggaagttagttaaggggattaaggagtggagtagggagaatttttatcggtttacgggcgcgagttagtgttcgaatttttgggagttcgaagagtttcgttaaatttgatttttttcgtttagtttttgtttggtagttttcgcgttttagagtaggtgtttggggcgggtagggggtgttttggtttggtttttggattttttaaaggagttagtatttattgggaaataatttttaggtaaggagaagaatcgggggtcggagcggagcgtgttttagaggtgcgtataaaattttaggggcgttaggaggtagtagcgacggcgtagcgtgggacggttaggcgcgacgggagggaagtaatcggttgtagttcggttttttgtatttggttggttcgggttggggttgtaagttttttagttaaatttatgtgaagtaaagtagttgtagtttgataaagaatggcgttttaataaatgatatagtaattttttacgttttggtttttagtttgtattgtataaacgttgtcgttattaaattttggttgcggattcgaagtgtgtgcgggtttaggatttattcgaagggcgtattttttgggaatgcgtatttcgtaggcgtaggagattttgagggtaaagatgcggtatttgagtttttcgtttgttttttaggttatttttgttgtttgattttgcgtcgtttttatttagaagtttttaaaattattattaagaaaagaaagattttataagatattgtttttacgttttttgtttagtttttttttatacgatttatttttaaatttttcgcggggttcgcgcgtttggttttttgagtggagaaaggattttcgagataaaatttattgttagttgttttaagaattttttagatttttgtatttttttttttttttttcgtttattatttttatttggaagtcgttttttttaattaggatttaattgtgaggggcgaggagttttttatgaaaagtcggggatttttatttttaaacgaaaagattgagattgtttttttttttattatttttggtatttttagcggggggagaggaggttatttgaagggaggttggtttgaatgtgagtcgttgtgtttgtgaaatttaggtaaggtaaagatacgtaaatttttgttaatattttttaaaaataagtttttgtttcggggtgagggatgtaggggtggataggaggaaaggagagttaagtaaatgtagaattttttttttttttgttatttatttttttagaatttttgtgggggcggggaggggaagagtatcggtgcgaatttcggggtgttttttcgttcgatttggattttttcgattaaagaggtgggaggagttttttgtagtttgcggggttaagaagaaagtgttaagttgaggagtcgtagtcggaggattttagggattcgataggaagttttcgtacgattttaacggatttatatgttcggaagtttaggcgatattaagttagcgttggggaattgacgtatttttgtagtcgtagggcgttttatgtttttttgtttttttttttgttgtgggtaacgttttttgcgggagatttgaggttttttaagggggatatgttagttatattggttttggcgttttgagttaagtattaggatttatagtttagtacgaaggtaggtagtatttttattcgtcgcggacgataggcgtttttttgtattttttttagttcgcgaggttcgtttttcgcgaggttttagagaaaagtaggttgtggaaaattgggcgttttttttttttatttatttttttatttttgttagcgtcgagatttgtagtagaggtttttggtttgaattatcgattggtaaagaaagttgtagattaaatttttcgttttatagagaaggaaattgaggtttagatagtcgaaggagaggtagtttatggagcgtagcggtaaagagtaaggggttggtggttttagaatggaattttagttttgttaggtaattaatagttgtgtgattttagacgagtttcgtagtttttttgagttttagtttttttattggttaaacgggataatgggatattagcgtttattttatagagttgttttgaggattagataggagagtagtgtgggtttttgatttaattaattttatagtttttgttattattattgtttaaggataggaaataagttagtggtaacgtcgagttgaaattcgggttttttaacgtttagttggaggttttatttattatttttttatttttttagagttaatgggatgtagaggcgaggatagtttttggaaaattatgtggcgttgatatattggtaaagcgtaggtatttcggtttcgaaggtgtataattattgtaatatgaaaaaatcgaggttgggtaggagtagggtagtgaggattttttaatttttatttttatttcggcgttgtttattgtatttgatagagcgcggagttgggttgttatagtcgtaattttagggattagtgcgtacgtttgggtcgtttttcgggagttatttagcggtcgcggataattgaataaatattttaaagcgttgcggtcggttaagggcggggatagttatattgcgcgcggggttcgtaggtcgtaataaagagtggttcgatttcgttgttgtttgtcgcgggagaggaataagttttcgattagcgttttttttcggggttcgcgtttcgagttttacgcgtaagatagtttaatagttgtttttttttttttcgtcgattttaatttttcggaatttgtttattcggggttgtagggtaagtgtttaggatggtttttagtttcgcgttggcggtgaaaattttaacgttatttttttaattaaaaaaaggggggggtaagggaggggttttgtgataattatttttagttttttttgattattttaaaattaagtcgattttttttaattagtttttatttattgttttaatttttttcgttgattttatttgggagttcggaatcgttaggtattgtcgaatgcggtgtaaaattttttttttttttttagttcgtagtgtttggagtcgttggggttattcgtttgttttgatgttatcgcgagatggttttcgagtttttcgagagtttttagtgaaaggatttcgcggtattgtttttattattatatcgtaaatttttttaaattttggaattaattatatagaggatatgttttaatttgttttgtattaatgttatagtggggatggaggttaggtcgtggttagagtagatacgtaggtttatgaaattgatgaattgagagttgtttttagttttgagcgtattatttggaattttagtttgaggttataattagaatttttgattttagatttaattttgtaaataataggggaaaaaaatggggaaaagaaaaattacgagagagggaaaaaaaattattttgtatttgtaaaaaaaaaaaaaaaaaaaaaaaaaaaaaaaaagttatataattttaaaattttttcgttttagataattttttttaagtattttttttgtgttttttaatttataaaagataatggaatgttttatagattggattttattttatttttttttttttttttaattgtttttagtttaatagttgttagttttattttagtgttgaatttaattatataggaataaaatattttttagtaaatttgtttgttaaatattttgttatatttattttttttttgagaaatggtttaattatagaaatttatttgtatttaggaattttttttttttttttttttttgatcgttattttagtttaatcgtaagtagagattttatttgtgtagtaattttatttgtgttttaaattcgtttagttaattttttttttttttttttagtaatattttgtttta

SEQ ID NO: 151 - DNA, 4316 bp, Artificial Sequence
  chemically treated genomic DNA (Homo sapiens)
ttgtagttaataaaaaaaaaaaaagaaagaaagaaattggtttttgttttattttatatgtttaggtataatttttttagagaagaagaggaggggggcggggaggagtaggaggaggaggaaagaaggaggagaaggagaaggagaagaagaggaagaggaagaggaagaagaagaagaagaagaagaggaagaggaagaggaagaagaagaagaagaagaagaagaagaagaagaagaagaagaagaagaagaagaagaagaagaagaggaagaagaggaagaagaagaaattgtttttagatttttatttttaggataagtttattgtttggtattaagttttttggggtgaatttttttttaaaagagttcggggagtttaggtatggaatgggaggtagaaagtttaattaagggattgggatttcggaatgaataatgaagggagatggattgggtttatgtcgaaggtttttttttggttttttagttttcgggcgaagatttagggagatattgagatatattttgtataggagggggagggggagggggagggtaaagttttagggttttaggagtggtttttaagggtttaggtttcgaggcggtgtttggggttggaaggtttagtattgagaattttttatttttttagagttttttttttttttttaattcgtgttaggttttttattttggatatttataacgcggttttattttttatttttattgggcgtcgcgtttttagagaagttaattagtgtcgtcgtagtttttaggttttaaagttttacgtatttcgcgggatttatattttttttagacgcggaggttggggttatggcgtttcgaagtttttttttgttgtttttaggggttttggttttgatcgatatttgggcgggtgagtgcggggtttagagagaaacggtttttgtggggaggagtgaggggttcgttcggtgggggcgtaggatttagggagtcgcgttcggaggagggtttggcgggttttatttttttttcgtttttaggtttttattttttgaggtattttagtatcgttgtgtcgcggttcggtcgcggggagtttcgttatatcgtcgtggagtacgtagacgatacgtaatttttgcggttcgatagcgacgtcgcgatttcgaggatggagtcgcgggagtcgtgggtggagtaagaggggtcgtagtattgggagtggattatagggtacgttaaggttaacgtatagattgatcgagtggttttgaggaatttgtttcgtcgttataattagagcgaggttggtgagtgaattcggtcgggggcgtaggttacgattattttttattcgttacggatcgttcgggttttttcgagttttcggattcgaaatttatttcgaggtagcggattcgtttagattttttattcgggagagttttaggcgtttttatcgaggtttatttttagtttaggttaaaattttcgcgggttgggcggggagggggcggggttagttgggcggggttgattgcggggatcggttagggttttatattttttagggaatgaatggttgcgatatggggttcgacggacgtttttttcgcgggtattattagtacgcgtacgacggtaaggattatatttttttgaacgaggatttgcgtttttggatcgcggcggatatcgtggtttagattatttagcgtttttatgaggtagaggaatatgtagaggagtttaggatttatttggagggcgagtgtttggagttgtttcgtagatatttggagaatgggaaggagacgttatagcgcgtaggtattaggggttatgggcgttttttttattttttgtagattttttgggatggtttcgtataaggttgggaggaaagtgggtttaatgttaggatatcgttttttttttagttttgagtaggaagaatttttttggttttcgagattcggtattagagagtgattgtgagagttcgttttgttttttgggataattaagggatgaaatttttgagggaatggagggaagatagtttttggaatatcgattcgcggttttttttgagttttttaatagttttgggtttcgtgattttttttttaagttttgttttttgttttatatttaatgtgtttggggttttgattttagtttttcggtttttatttaggttagggttagaagtttttgttttttatttagagattcgaattttttaaggaataggagatttttttaggtgtttgtgtttaggttggtgtttgggttttgtgtttttttttttattttaggtgttttgtttatttttaggttggttatatgggtgttgttggggttttttatgaggagtgtaaagtgtttgaattttttgattttttttagattttttaaaggtatacgttgtttattattttatttttgattatgaggttattttgaggtgttgggttttgggtttttattttgcggagattacgttgatttggtagcgggatggggaggaatagatttaggatatagagtttgtggagattaggtttgtaggggatggaattttttagaagtgggtcgttgtggtggtgttttttggagaggaatagagatatatatgttatgtgtagtacgaggggttgttttagttttttattttgagatggggtaaggagggagatgggtaaagaggggaacgaggggttatgtttttttttagggaaagtaggagtttttttggagttttttagtagggttagggttgaggtttggagattagggttttttatttttttttttttttttagagtagtttttttagtttattatttttatcgtgggtatcgttgttggttttgttgtttttggagttgtggttattggagttgtggtcgttgttgtgatgtggaggaagaagagtttaggtaggaaggggtgaggagtggagtttgagtttttttgttttattgggggttgtaagttttaagtagaagtgtgttttgttttattattgggaagtattatttatatttatgggtttatttagtttgggttttgtgtgttagtatttatttatttgtaaagtttttgtgaaaatgaaggatagattttttatttcgatgattatggtggtgatgggatttgattttagtagttataaattataggggaaggtttttgttgatgatagattttaggagggtagttggtttaggatttatatttgttttttttatattttttgattttgttttggatttatagttatatttttttggaaatttttttgggattaaagattaggggtttgttttaggattttatggttttgttttttttttggttttttataggatattttttttttatagatagaaatagagggagttatttttaggttgtaggtaagatgaaggaggttgatttttgagattgttgggatattgtggttaggagtttatgagggagtttatttattttatagtttttttagttatatttgtgggttttgattaggttttgtttttgttttattttaattattgatagtgtttagggttttggggtgttttttatagttaataaaggtgatattttagggtaggggttttgatgtgagtggggtgttgggggggaatagaggggatttagttgtgttattgggtttttttgatttggatgttttgagtatgaaatgggttatttagagtgttattttttattgtgattgatacgaatttgtttatgaatattttttttatagtgtgagatagtttttttgtgtgggattgagaagtaagatattaatgtagtagaattgtatttgtgttttacgaatatatataaattttaaaaataaagaataaaaatatatttttttatagatataggtagatatgtttttatagtatgtacgtaaatgtgtgtgtgtgtgtgtgtgtgtgaagagaaagagtgaatagagagattaagatttttttaatggtgaaaagatatatatatatttggaattagttagtttgatttagtttaggtgattttaattttggtggtaataattaaagtatcgtagttaggagttagtcgaatatatgtttttttttttttattagattgaattagagtgttgattttggttatattaatgttataaatttttttatagtttgtttgatttggtgtttgttggttttaatatttatagtgaatataagtaggttgttgttttttattttttttatagtttatttagtggttagcggaaatttgatgataatatggtggttaagttt

SEQ ID NO: 152 - DNA, 4316 bp, Artificial Sequence
  chemically treated genomic DNA (Homo sapiens)
aagtttgattattatgttattattaagttttcgttgattattgagtaggttgtgaagaagatagaaaataatagtttatttgtgtttattgtggatgttaaagttaataagtattagattaaataggttgtgaagaagtttgtgatattgatgtggttaaagttaatattttgatttagtttgatggagagaggaaggtatatgttcgattggtttttgattacgatgttttggttgttgttattaaaattgggattatttaaattgagttaagttggttaattttaaatatatgtatatttttttattattaaaagaattttaatttttttatttattttttttttttatatatatatatatatatatatatttacgtgtatgttataaaaatatatttatttgtatttataaaaagatatatttttattttttatttttaaaatttatgtatgttcgtgaggtataagtgtaattttgttatattgatattttgttttttagttttatataaggaagttgttttatattatagagaaaatatttatgaataaattcgtattagttatagtgagaggtaatattttaaatagtttattttatgtttaagatatttaagttaaagaaatttaatagtatagttgagttttttttgtttttttttaatattttatttatattagggtttttgttttggagtgttatttttattagttgtgagagatattttagagttttgggtattgttagtgattggggtagaataaaaataggatttggttagagtttatagatgtggttagaggaattgtggggtgggtgagtttttttataggtttttgattataatattttaataattttagggattagttttttttattttatttgtagtttgagagtagttttttttgtttttatttatgggaagaaaatgttttgtgagaggttagaaaggaggtagggttataaggttttagagtaaatttttagtttttgattttagagaagtttttagaaaagtgtaattgtagatttagggtaggattaagaaatatgaagaaagtagatgtgggttttggattaattgtttttttgaggtttgttattagtagggatttttttttgtgatttgtgattgttgggattaggttttattattattataattatcgaagtgaagaatttgttttttatttttataggagttttataaatgagtaggtgttggtatatagggtttaggttgggtagatttatgagtgtggatggtgttttttagtaatgaggtagggtatatttttatttggggtttgtaatttttagtgggataagaaaatttagattttattttttatttttttttatttgagtttttttttttttatattatagtagcgattatagttttagtgattatagttttaaggataataaggttagtaacgatgtttacgatggggatggtgggttggggagattgttttgggaaaggaagggaaggtgaggggttttgatttttaggttttagttttgattttgttgaagagttttagaagggtttttgttttttttgagaaaagatatgatttttcgtttttttttttatttatttttttttttattttattttaggatgaggggttggggtagtttttcgtgttgtatatggtatgtgtatttttgtttttttttagaaggtattattatagcggtttatttttggaaggttttattttttgtaggtttggtttttataagttttgtgttttgggtttgtttttttttatttcgttgttaggttagcgtgattttcgtagggtagaagtttagggtttagtattttagggtggttttatggttagagatggggtggtgggtaacgtgtgtttttggaggatttgagaagagttagaaaatttaggtattttgtattttttatgggaaattttagtagtatttatgtgattaatttgagaatggataggatatttggggtggggaagggagtatagaatttagatattagtttggatatagatatttgggaaaattttttattttttggaaagttcgagtttttgagtggggagtagggatttttggttttgatttaagtggaggtcgagggattggaattagagttttaaatatattgagtgtgaggtagagaataaaatttgagagaaaagttacggggtttaaggttgttggagggtttaaaggggatcgcggatcggtattttagggattgttttttttttatttttttagagattttattttttaattgttttagagagtagggcggatttttatagttattttttggtatcggatttcgaaagttaggaagattttttttatttaggattagagggagggcgatattttagtattgggtttattttttttttaattttgtgcgaggttattttaagagatttataggagatagggaaggcgtttatggtttttggtatttgcgcgttgtagcgttttttttttattttttaagtatttgcggagtaattttaggtattcgttttttaggtaggttttgaatttttttgtatatttttttgttttatagaagcgttgggtgatttgagttacggtgttcgtcgcggtttaggagcgtaggttttcgtttagggagatgtaatttttgtcgtcgtacgcgtgttggtgatattcgcggaggaggcgttcgtcgggttttatgtcgtagttatttattttttggagggtgtgagattttagtcggttttcgtagttagtttcgtttagttagtttcgtttttttttcgtttaattcgcggggattttggtttaaattgaaaatgaatttcggtaaaggcgtttgggattttttcgggtggagggtttgggcgggttcgttgtttcggggtagatttcggattcggagattcggggggattcgggcggttcgtggcggatggggggtggtcgtgatttgcgttttcggtcgggtttatttattagtttcgttttggttgtagcggcggagtaggttttttagggttattcggttagtttgtgcgttggttttggcgtattttgtggtttatttttaatattgcggttttttttgttttatttacggttttcgcggttttattttcggaatcgcggcgtcgttgtcgaatcgtaggaattgcgtgtcgtttacgtattttacggcgatgtagcggggtttttcgcggtcgggtcgcgatatagcggtgttgaaatattttaaggagtgggagtttgggggcgaggagggggtgagattcgttagattttttttcgggcgcggttttttgagttttgcgtttttatcgggcgggttttttatttttttttatagaggtcgtttttttttggatttcgtatttattcgtttaagtatcggttagggttagggtttttgagagtagtaggaggaggtttcggggcgttatgattttaattttcgcgtttgggaaaaatatgagtttcgcggggtgcgtgggattttagaatttgggaattgcggcgatattgattggtttttttagaaacgcgacgtttaatgggagtgagaaatggggtcgcgttatgagtatttaggatgaaggatttgatacgggttgggagagaaagagaaattttggggagatggggaatttttaatattgagttttttaattttagatatcgtttcggggtttgagtttttgagagttatttttggggttttgggattttgtttttttttttttttttttttttttgtgtagggtgtgttttaatgtttttttgagttttcgttcgggggttgagaaattagggagaaattttcggtatggatttagtttatttttttttattatttatttcgaaattttagttttttgattgaattttttgttttttattttatatttggatttttcggatttttttggaagaaaatttattttaaggagtttggtgttagataatgaatttgttttgagaatgaaggtttagagatagttttttttttttttttttttttttttttttttttttttttttttttttttttttttttttttttttttttttttttttttttttttttttttttttttttttttttttttttttttttttttttttttttttttttttttttttttttttttttttttttttttttttttttttttttttttttgttttttttcgttttttttttttttttttttggaaaagttgtatttgagtatatgaaataggatagagattagtttttttttttttttttttttttttattagttgtag

SEQ ID NO: 153 - DNA, 14147 bp, Artificial Sequence
  chemically treated genomic DNA (Homo sapiens)
gggggtattgagtaatatatttagattaataatattttataagtgtgagtattattgatttaaatttttttgttggttgtgttttgtgtttatgtttgttttatatttattttttttagagttgttttttttagagttttagtaatttttatttttttaaatttttttagttatgggaaggattagtaggtgttagtggatttaaaagaattttagatttgttgagatttttgatttttggtgtttagattaattagtaaatagtttaattaaacggtttgtttttatggttaatataattttgaattggtggttatttagattaagtttattttgtttttgagacggaattttgtttttgtcgtttaggttggagtgtagtggtgcgattttggtttattgtaatttttgttttttgggtttaagggatttttttgttttagttttttaagtagttgggattataggtatttattattattttcgattaatttttgtatttttagtagagatagggttttgttatgttggttaggttggttttaaatttcgattttagatgatttgtttattttagtttttttaagtgttgggattgtaggtgtgagttatcgcgtttagttaaagtttagtttgtataagaaggttttttttgttatgttataggatttttgagtttattaaatagattttaatgttttgagattttacgtatttttttaaaatgaagtatttaaattgttagtgtttgtttttttgtttggtttttttgatgtattgatttggtttgttagtgtgatgaaaaatatggttgagttttattgttttattgtaattagtaggattgtttagaagtttaatttttttaagagatgaagatttgagtttatgtagttggttgttttttaaaaatatttggttatttgggatatattttgaattaattttttggttattttatgtgattaaaagtgttagttttttttgtttttagtatatttttttgtttgggaagtggaagggatgaaatttttatatttttttttgatgatatagaaaggagtatatatttatattttatgaatagatatgtaattatagaagaaatagtttaacggtcgggcgcggtggtttatatttgtaattttagtattttgggaggtcgaggtgggtggattacgaggttaggagtttaagattagtttgtttaagatagtgaaatttcgtttttattaaaaatataaaaaattagtcgggaacggtggtaggcgtttgtaattttagttatttaggaggttgaggtaggagaatcgtttgaattcggagggtggaggttgtagtgagtcgagattacgttattgtattttagtttgggcgatatagtgagattttattttaaaaaaaaaaaaaaaagtataattatatgattatttatattgttttatatattaaattagtagtaatttgttttttatatagtaaataaaaataaattagtagtaataaatatattttttttgtgttatagttagtatttggtgaattttgtattttttttttttttaaagtgttgaatttataggtttttataaggtaagtttatattattaattaattttgtttttttttttgatgttaaaattgttttttaggagttgattaggtttatttttttgttttttaagtattatttttagaatatttttgaaagtatttttgttttttggtaataatatttatattttatttattttttgtttttaaatatatatttagttaattttaggttttttttaatggagtagttatttatttatttaatatacgttgggtgttttttttgtgttatatattgttttggtttttggggatagagtaggaaataaaaaaaaataaaatttgtttttatatagttgatattttagttaggggagataaataataaataaatgaatgatgtagtatgttagatgttgatagtgttatggagaaagtatattatggagattagaagtattatttgtaatggaatagttatgattttaagaagaatggttgattggatgtgaagtgtgagagagaggagtttaggtttttggttgagtaattggagggatggagttgttattatttgagatggagaagttaggggaggagtagatttggaggggaaggttaggaatttagtttggaatttgttaagtatgaggtatttattaaatattgaagtggatttttagaagatgttattaaaattagttaagtttaggagagagttttgggttagaaataaaaatgtgggagatattggtatatatatgggtttatattatttttttttttaatttaatattttattttattgttttttgtttttttaatagtatttagttttatttattttttaaattgatttttatattgatagtataataaaatttatattttttattatattaagattttgtgtgatttaatttttttttattttttggattttgttttaggttattttttttttttatttaatttttaatattttgattttattgttttttaaatagttttttgttgttttttgttttttttgtggaaaaggtttttttattgtttaattattaggtatttttcgatttttttttattttttatttttgagaaaggttttttttgattttttatattaattaggatttttttgggcgagatttgatttaaattggtttagagaaaaggagttaattgattggtttatgtaatttaattttttttttttgttgtaatttttttttggtttttattttatttaaggttaaagttagggtttttattatggttttgtaggttttatatagtttgttttttttattatttttttgattttattttttatattttttttttatttatttttttttagttagagtggtttttttgttgtattttaaatatgttaggtatatttttattttagtgtttttgtgtttgttgttttttgtgtgtggaatatattttttatatagttatattatttaaaatttattgtttttaagtttttatttaaatgttttttcgtgaagttatttttgagttttttttaaaattgtagttttttatttttgtattttttattgttttttatttttaatttttgttattgtagttagaattatttgatatatagtttttattttattggttttttgttatgtttttttttataagaatttgaagtttattaggtcgggagttttgtttgttgtgtttgttgttattttttagtgtttaaaattgtttggtatatagtaggtatttaataatttttgaattagtgaaaattagatggtggtttggtatttttatataggaatgagttaggtggaaattatttaggatataagtagattttgaagtgataaggaagggttattataattatgtggggtttattttgtttttttttgttttttttttttaggtttagtaatagttttattaaggattttatgaatattaaagtttatatttatatgttgttagaggtgagagtagtttattttattattagattttgtgtttagggtggtgatttgaagaaggaagagagcgaaagaagggaaggattatttttttttttaaattggagttaagggagggaggttagagtaagtttgggggcgtaatttagatttagtttttgtttaattttttttgtttttttttttaggggtttagagaattataaggtttgtagaattttttagagaagttttattattgattttttttttttatttttagatattaaagagtttgaatgtttttgagttatatggtttttttttttttttataaattttgttagttgttacgggggtttgtttttagggtataaagttattgagagatttagagatttagtttttttgtggaatttttaaaatgttttagtagttttgtttttagtttgttgtttggtagtatttgttagttgattttatgtattgtttttttttttgttattttggtaatttgggttttttattttatttttttttttatttttttttttagacgttattttttgaattgttatagagaatgggttaatttatggtggaggtttgtttatttttataataattaaagggttttaaggtttacgtttttatatatttaattattttttaggtattttaaattatatttaaattttaatttagttttattttgttttagtttttgtttgtaagtgttttagtttttaatgggtatagatttggatttcgttttttttagtcgggtttttattttaggttgagtttagttatcgttaattaatgtagagttaggttttttttttttttaattttggtcgtagtttaattttgttttttgaaagtatttcgtttttgttatttaatgttttttcgtgtgtttgatagttattttgtttttttattttcgttgtgttttaaattcgtttttatttagttttatggttttgtttaatcgtagagttgttttgttcgtttacgcggagtttagttcgatttattttcgtcggttgttacgtttatttttatataagttttgttttcgttgagtagtatggcgtgcgatatcgtttttttggtgttttggtaggggtttagaagtttttcgttcgttaattagagaaaaatagggttatttattttcgtttttgggggttgttttttattaattttatgtaagttaattagtgtgaggtagattttcgttttttcgatataggtttcgagtttttttagttgtttatagttcgttagtttttgagttaatcggcgtggagtatcgtgaaggtcgaacgcgttttttcgggattttaggggtcgtgagcgttttattatttttttttacgttaattacggtatagttttgtagggaagggttcgttttttaatttttcgaggttttgcggtcgattaatagcgttttggttaattagcgagcggcgggatattgggtttttttttttcgggtttacgtgagttgtagggaaacgtaggggcggtttttaggtgttgtcgtcgttatcgttattattatttttatcgtcgtttcggaatttaggtttggggggcggtggggtcgcgtatggagttttcgtttttcggagttgttaatattgttaacgttatcgttacgttatatataggtgagttttgggtttggagggtggagggtttagttcgtgattttacgtatttttttcgttttcgcgtagaggatgtggtttggtcggtggtttgttggtgttcgatttttcgtcgttattattacggttggtggatttgcgtgtggtattgtttaagtttttcgttttttatagtggatttgatcgtggtttaatttttttttttcgttgtataatggatcggtttgcgtgtttatgtttttttttacgttaatttagggtggattcgtttataggttttttttttatttttatttttattcgttttttatttatttttatttatagggagttagtttgtgatagtgtttagtttttttaatagtaggtgtatttgagtgtttggattttttttagttttaatttttaggagattcgttcgtggttttatttattttattttttttgtatatcgtagcgaattaattcgtggcgtcgtattttttcgtatttttttttaatagtgagtttatttgagtttgtatttttgttttttttagttttttaatgtattagtttatggttttttttaaaattattttttttttttattattattattattattttatagtggattagtttttatgtttggatttacgtttttttagttattagtttattgttttgttttttttttttcgtagattgtcgttttagcgtttggggtttttttttttttaatagtgggttagtttagtgttttatatttttttatttttagtagtttagtttatagttttttttttttttgttttgaattagtttgtgtgatggtttttttttttttttattgtggtgtaggagtttgtaaggttttttgttttttttttttttagacgatgagttttattatttttttttttgtagtggatttgtttattggttttttttttttatatttttgtatgtttgtatagtttttcgtatattttttcgtgagtttagtgttttgtaattgggggaagatcggtcgtgtatttttaatttttttttttttttttttttttttttagaagagaacgtgttgatttttttttttttgtgatggagtattgtacggttttttttgttttttattttttaatagtgggttagtttggttatattcgtaattataaagacgttttgttttattataataagtgaatatattagcgttagtgatgatagtaatgttaataggagttagcgtttattgagtatttgtcgtatattaggtagagtgttttatatgaatgagtttttttaatttttattataattttatgagataggtagtgagggaattgggttatagggaggttaaattttttatttaaaggtggtttaggaagtatttaggatataggataatttttgaggttttttttttagattttattttattttacgtgaggttttagtttttaaaaattaaattagtttttatttttaagtttttgtttttgttgttttttttgtttgtagagtagtttttattttttatttttttttagtatttatttattttttaattttagtagttgtgtgattttagatgagtgatttaattattttttttttgtgtttttttttttatttgtgaaatgggggattagaattagaattttttttagtgtaaataaatattaattgtgaattaatggtaaaataagtaatttttttagtattatcgtttatatttttttatttttttattgtgttttaattatattggttttattatatagttttttaaatatagtaggtatgggttagttttagggtttttgtattggttgttttttgtgttttgaatattatttttagatttttgtatggttttttttagtattttgtttaaatattaatttttaaaggatgtttattatattgtggtgtgtggaatgtagtataaaaagatatatgtatgaaagatgtttttaagaatgttagtttatatatgagtaagggttttttttttttttaaaaggatgtgtttataagattgaggtacgtaatatgttttgtaaaggtataggtataaaagttgtttttaagagtgttagttgtatatgtgaataaggattgtgttgttgtattgaaagaatgtgtttataaaattgtggtgtgtagttgggtataggggtgtgtatttatagttttagttattcgggaggttgaggtgggaggatagtttgagtttaggagttttaggttagtttgggtaatatagcgagatttttttttttgaaaaaaaaaaatttaaaaaataattattgtggtgtgtgtaatatatttttttaaaggtataggcgtaaaagatgtttttaagagtgatttgattttgttgtatttgggtagtgttattttattaaaggttgattgttatattatggtatttagaatatattatataaaggtatatgtataaaaaagaagtttttaataatgttatttgtaaaaataaaaaaagttaatttttttttgattatttgaagttgtatatttagtagggtttaagttaggtttttgatttgtttcgttgttttttattattgtttgatatattgtgtgggttatttgtttgttgtttgtttttttttattagaatgtgagttttatgaggatttagtttttgtttgtttatttatcgttatgtttttagtaattgaaaatgtattaggtaaatagtagatgtttaataagaatttattttatgaataaatgggaaaaagataatttgagatattagtgtaggggttatatgaggaagaagaagggatatgagagttaattagttgggattgtttttgtaattaatttttattgagttttttgtgagtattaggtatttttttaggtgttggaatatggtaaggaacgaaatagggcgaaatatttgtgtttgtggagttgatatttattaaaagttggggaggttgggtacggtggttaatattagtaattttagtattttgggaggttgaggtgggtggattgtttgagtttaggagtttaagattagtttgggtattacggtgaaattttatttttattaaaatataaaaaaattagttgggtgtggcggcgtgcgtttgtaattttagttatttgggaggttgaggtaggagaattgtttgaatttaggaggcggaggttgtagtgagttaagattgtattatgtattttagtatgggtgatagagcgagattttgttttaaaaaaaaaaaaaaaaaaatttaagttggggagatagattatgtgaataaaataaataagtaaaattagtataatagataaatgttgagaagaaataatgaaatagggtaggtaggaatcgagtattgggggtggttgaaattttaggtatagggaaggtgatttttgaattagggttttacggtagagacggagagagttttaatgtttacgggaagagtatattaggtagaaggaagtgttagtttagaggttttgaggtgggatggtgtttgttatgtttaaggaatattaaggcggttagtgtggttggagtagagtgcggggaagggtagaaggtgaggttatataggtgatgggagttagatagtgtaggtgatatataggataggattgtaggggtagggggagaaggatgatatattagttaatagttaatatttgtggagtatttgttatatattagaggtatttttttgtttaaatattaatttttaaaggatgtttattatacggtggtgtttggaatgtattataaaaagatatatgtgttaaagatatttttaagaatgttagtttatatatgaataaggattttttttttttttaaaaggatatgtttataaaattgaggtatgtaatatgttttatggaggtataggtataaaagttgtttttaagagtgttagttgtatatgtgaataaggattgtgttgttgtattgaaagaatgtgtttataaaattgtggtgtatagttgggtatagaggttgaggtgggaggattatttgagtttaggagttttaggttagtttgtgtaatatagtgagattttcgttttcgaaaaaaaatttaaaaaataattattgtggtgtgtataatatatttttttaaaggtataggtataaaagatgtttttaagagtgatttgattttttggtatttgggtagtgttattttagtaaatatttattgttaaatattatggtgtttggaatatattatataaaggtatatgtataaaaaagaagtttttaataatgttatttgtaaaaataaaaaaaaaagttaattttttaagttttttatagaagtattttatagaattgatatagttaatttttatagaagttttggagggtaggtgtatttttgagaatatttgattttgagagtaaaatatttttattttatagatgaggaaataagtaaagagaggttgagtaatttgtttagggtaattttgagttagaatagttagaataggggtagaggaatataaggttgaagatttagaaagaagaatagatttgtaagggtaggtaggttatttggtatttttgattacgtagaggaagaatgaattttttttggaatgcgatgattgtgtaattgagtttatgaagtgagggaagagttttttttgcggggagagtagttcgtgtttatttttagaggttggaattgtttcgggaacggtagatagtttagggtggttgttttagagtttttgtatacgtcgttcgtttcgtttgaaggtttttttttatagagggtagtttggtttgttatttttttttttttaggttaggtgttatttttttggggaagaattttttgtatattttgtgtaaaaatagtatttttgttattttttaggattttatttttttttgtttttttttatggagaattggtggtgtaaggcgattgtttattagagttaaattatttaggttttgaatttcggttttgttaatttttagttgtgtgatttggggtaggttatttttttgtatttttattgttttatgtggaaaatgggggaaatgataatttttattttttaacggtggtttgaggatttaatgagttaaatgatttaaagagtgtgtagtttacggtaaggatcgtatgtttggtttgtatttttaaattattaaaatgtatttatagtatattcgtagatgtttgataggtttttgaaattgattatttttaaaattggtgtgattttttttaaaatttatttttttgtaaggtttttattttagttgattataatgttgtttttgtgggtgattaggttataaatttagatttattttggattttttttttatttttttcgggtatgttatttgttagtaagttttattttgtgtttaggttttttttagattttagttatttttcgttagttttattgttattattattatttatcgtagtggtttttttagttttaatagtttgttttttttataatcgttagggggattttgttgaaattttagttatagtttgttatttttttgtttataatttttttgtggtttttgttttatttaatattttgatagtattcgaaaaagtttggtttagtttggttttcgttattttgtttttttttttcgttgttttttttttttttttcgaatttatgttagttttttttttttatgttatttgttaggtattttttagttttgggttttttatatcggttgtcgtttttatttggtttgttgtttttagatatttacgagtttagtttttttatttttttttggtttttgtttagttgttttttttttggcgattatttttttttgattttttatgtaaaagtaatagtttttttttgtttgattttttttttataatttttattattatttgacgtatttttgtatatgtttgtttttttttttatttgttttttttgttaagatgtgagtttttttggagtagggattgttgtttgttgcgttttcgattgtattcgtagtatttggtttatagtatgtatttattaaatgtttgttaagtgaaggagatggaaagaagtaaatatatttaagtaaggtagattattagaatttttatgaggggttaagtgggagaaataataaaatataaagttttgtgtgttgttgaagttggaagtttatcgttattttttatttagttgataggttttgttgtagttgaaagaagaattggtaaaattgtttgtttttgttattaggagttattttgaattttttggatttttgaaataagtttgtttgtaaaataaatttagtgaggtttttggtgataggattttttaatcggatattttatggttttgtgatttgtataattgaataggaagtttatgtttatttttagtttgtttttaggaaagaaagtagtaatggggtgatagggaggattttgttttttgaaggatatgttgagagggaatagtcggtgtgaggggtcgtttagtttaatggtgaaatgtttagttaattggaatttgattgtttggttttaaatgttggttttgttatatgtggtttgtggaaggtacgtagatatttgtgttttcgttgttttatttataagttaatgataggaagattatttattttttagaggtatgattagggataaataagttaatgtttattaaaaaaaaaaataatagtataggtgtatatgtttttatttaaaatttttggggttagatgtgttttagaatttttatttttttatattttagaaaggtaatatgatgtatatacgatgttatataatattttttagtaagttttgtaatcggttgtgtttatatttttgtagtaaaatgtatgaatattcgtaataagtgagatttaataaagattagaaagggttttgttttattttaaattaggttttgttattaaaagagttaaaagaagttttttgtttttagagtattttggatgttggaatggtagataagggattatgaataaattagaaattaatatttagagtttattatatattttaggtatataatatttaatttgtataatatttttgtgaattaggtattgttatttttattttattaatgggtatattattatttttgttttatatatgagaaaattgaggtataaagaggttaaagaatattagttaagcgtggtgttttatgtttgtaattttagtattttaggaggttagggagagaggattgtttgagtttaggagtttaagaatagtttgggtaatatagtgagattttattttttaaaaaaagaaaaagaatatgtttagggttatatagttaataagtggtagaattaggatttaaatattggtaatttggttttagtgtttgggtagttgtttagtaggttatattgtttttttgtttagaagagtgtttgatgtgtattaagtttttaatagatgttaattattgttgttattaagaaagagaatatttagggtcgagtacggtattttatatttgtaattttagtattttgggaagttaaggtgggaggtgggtggattatttgaggttaggagtttaagattagtttggttaatatggtgaaattatgtttttattaaaaatataaaaattagtcgggcgtggtcgtgggtatttgtaattttagttatgcgggaggttgaggtatgagaatcgtttgaatttgggaggtagaggttgtagtgagttaagattgtgttattatattgcgttttagtttgggtaatagagagagattttattttaaaaaaaaagaaaaaaaaaaaaagaacgagaatatttagggatagtaataggatagagagattaggtatttatttagttttaggacggttttataaaggaaaggatttttgggttgggatttgaaagataagaaagattgttaggcgaaagaaggaagttttacgtggagtgagtagtttttgtaagggtttggtaaaaaaaaaattttttgaaaaatttgatattgatatggtagaagatatagataatatttaaatgaggaggatggaattagttttttatttttgttgtaataaataattataaatttagttgtttaaaataatatatttgttattttatagttttgtaggttagaagttttatattggttttagttgaaattaaggtattggtagggttgcgttttttttggaggttttaggggaaaatttattttttgtttatttaagttgttggtagaatttaattttttgagattgtaggattgaagtttttgtttttttattgtttgttagttgatagttatttttagttttaagaggttgtttatagtttttgattttgagttttttttttttatttttaaagttaataatggtaggttgagttttttttatattttgaattttttttgttttttttgttattatatttttgagttatttttttttttttattatttgttttttagagtttatatgattagattgaattttattaaataatttagaaataatttttttgttttagggtttgtaattttaattttatttgtaaagtttttttttgttatgtagtgtaaataatatataggtttcgaggattaggatgcggagtagggttggtattatttggtttattatagtttgttttttgatttttatagatttatatttgttttatatttaaaatatatttatattattttaagatatttatgagttgtattttattatagggagtattttaagtaagattggggagttagaagttagtttgggaaggtttagggaatgatggtagggtttgaagatagagatggagaaaagatgataaaaaaaggaatttttttttcgttgatttttgttttttttatgtttatagttttttaatttagttgtttgttttttagg

SEQ ID NO: 154 - DNA, 14147 bp, Artificial Sequence
  chemically treated genomic DNA (Homo sapiens)
tttggagagtaaatagttgagttgagaggttgtggatataggaggggtagaggttagcgggaggaggatttttttttttgttattttttttttatttttgtttttaaattttattattattttttaaatttttttagattaatttttagttttttagttttgtttgggatgttttttgtgatgggatataatttatgggtattttaggatggtgtgaatgtattttgaatgtgaaataaatgtgaatttgtgggggttagagggtagattgtggtaggttaaatgatgttaattttgtttcgtattttaattttcggaatttgtatgttatttatattatatagtagaaaggaattttgtagatgaaattaaggttataaattttaagatagggagattatttttggattatttgatgaaatttaatttaattatatgagttttgaaaagtagatgatggagaaagaaaggtagtttagagatgtgatgatagaagaggtaggggagatttaaaatgtgagagggatttaatttgttattgttggttttgaagatggaggaaggaggtttagaattaaggattgtgggtagttttttaaagttgggaatggttgttagttgatagatagtaaggaaatagggattttagttttataattttaaggaattggattttgttaataatttgaatgagtaggaaatggatttttttttagagtttttagaaggaacgtaattttgttaatattttgattttagttgagattagtgtgggatttttgatttatagaattgtaagataataaatgtgttgttttaagtagttaaatttgtgattatttgttatagtaagaatagaaaattagttttattttttttatttgaatattatttgtattttttattatattaatgttaagttttttaggaggttttttttttgttagatttttgtaaaggttgtttattttacgtggggtttttttttttcgtttagtagttttttttattttttaagttttagtttaaaggtttttttttttatgaagtcgttttaaaattgaatgaatgtttgatttttttgttttgttattgtttttgaatgttttcgttttttttttttttttttttttttttgagatggagtttttttttgttgtttaggttggagcgtagtatagtggtataattttgatttattgtaatttttgttttttaggtttaagcgatttttatgttttagtttttcgtatagttgggattataggtatttacgattacgttcggttaatttttgtatttttagtagagatatggttttattatgttggttagattggttttgaatttttgattttaagtgatttatttattttttattttggttttttaaagtgttaggattataggtgtgagatatcgtgttcggttttgaatatttttttttttgatgatagtaataattaatatttattgagagtttaatatatattaggtatttttttaagtagagaggtaatatggtttgttggataattgtttaggtattagggttagattgttagtgtttgaattttggttttgttatttattagttgtgtgattttgggtatattttttttttttttttaagaaatggggttttattatgttgtttaggttgtttttgaatttttgggtttaagtaattttttttttttggttttttaaagtgttaggattataggtatgaggtattacgtttggttgatattttttaatttttttgtattttaatttttttatgtgtaaaatagggataatgatatgtttattagtaaaatggggataataatatttagtttatagagatattgtatagattaaatattatatgtttgaggtgtatgataagttttaaatattagtttttgatttgtttatagttttttatttgttattttaatatttaaaatgttttaagggtagaaagttttttttaatttttttggtggtaaaatttgatttgaaatgaaataaggttttttttggtttttattgaattttatttattgcgagtgtttatatattttgttgtagaaatatgaatatagtcgattatagagtttattaaggggtgttatgtaatatcgtatatgtattatgttatttttttgaaatgtgaagaaatggaaattttgaaatatatttggttttaggggttttgggtaagggtatgtatatttgtattgttatttttttttttaatgggtattgatttatttatttttgattatgtttttgagaagtaggtagtttttttgttattaatttataaatgaggtagcggaggtataaatgtttacgtattttttataggttatatgtggtaaagttagtatttggagttaggtagttaggttttagttgattaagtattttattattaggttaaacggttttttatatcgattatttttttttagtatgttttttaaagaataggattttttttgttattttattattgtttttttttttgagagtaaattggaaataaatatgagttttttgtttaattatataagttataaagttatgaagtgttcgattagagagttttgttattagagattttattgaatttgttttgtaggtaggtttgttttagaagtttaaagagtttagagtgatttttggtggtaaagataggtaattttattagttttttttttagttgtaatagaatttattagttgagtgaaaggtgacggtgggtttttagttttaatagtatatagggttttgtattttgttattttttttatttgattttttataagagttttagtaatttgttttgtttagatatgtttatttttttttattttttttatttagtaagtatttggtgagtgtatattgtgggttaggtgttgcggatatagtcgagaacgtaatagataataatttttgttttagaggagtttatattttagtaggaaaggtagatgagaaaaaaggtaaatatgtataagagtgcgttagatggtggtaagggttatgggaaaaaaattaagtaggggagagttgttatttttatatggagagttaggggagagtagtcgttaaggaggggataattgggtagagattaaaaggaggtgaaggaattgagttcgtgagtatttgagagtagtaagttaggtggaagcggtagtcggtgtgaagggtttaaggttggagagtgtttggtaggtgatatggggagaggaggttgatatgggttcgggggagaggagggaggtagcgggagaggagaatagagtgacgggggttagattgagttaggttttttcgggtgttgttaggatgttgagtgagataggagttataagagggttgtgaatagagggatgataggttgtgattgagattttaataggatttttttggcggttgtgagaagaatagattgttggggttgaagaagttattgcggtagatgatggtggtagtagtggggttggcgagaagtagttggggtttggagaaagtttgaatatagaataggatttgttgatagatagtatgttcgggggaggtgagagaagggtttagggtgagtttaggtttgtggtttaattatttataaagatagtattgtggttagttgaggtgggagttttgtaggagagtaagttttgaggggggttatattagttttggagatggttagttttagaggtttgttagatatttacgggtatgttatgaatatattttaataatttaaaaatgtaagttaggtatacgatttttatcgtgggttgtatattttttgaattatttaatttattgaatttttaaattatcgttaaagggtggggattattattttttttattttttatatgaggtaatggaggtatagagaagtaatttgttttaagttatatagttggaagttggtagagtcggaatttaaaatttaagtggtttggttttagtgagtaatcgttttatattattagttttttatgaagagaaatagagaagggtaagattttagagagtgataggaatgttgtttttatatagggtgtataaggagtttttttttaaggaagtgatatttggtttgaaggaggggaggtagtaagttaggttgttttttgtgggggagggtttttaggcggagcgaacggcgtgtataaaggttttgaggtagttattttgaattatttatcgttttcgagatagttttaatttttgagggtaagtacgggttgtttttttcgtagggagagttttttttttattttatggatttaattatataattatcgtattttaggaagaatttattttttttttgcgtgattaaaggtgttaaataatttgtttgtttttgtaaatttgtttttttttttgagtttttagttttatgtttttttgtttttgttttggttattttggtttaaggttattttgagtaagttatttagtttttttttgtttgtttttttatttgtaaaatggggatattttatttttaaagttaaatatttttaaaagtatatttattttttaaggtttttgtgaggattaattgtgttaattttgtaaaatatttttgtaaaagatttgaggggttgatttttttttttgtttttataagtagtattgttaggaattttttttttatatatgtgtttttgtatagtatattttaagtattatagtgtttaataatgaatatttattgaaataatattatttaggtgttagaaaattaaattatttttagaaatattttttatgtttgtgtttttaggagagtgtattatgtatattatagtggttattttttgggttttttttcggagacggggattttattatgttgtataggttggtttggaatttttgggtttaagtgatttttttattttagtttttgtgtttagttatatattatagttttgtgaatatatttttttaatgtaataatatagtttttatttatatatataattagtatttttagaaatagtttttatatttgtgtttttatagagtatattatatattttagttttgtgaatatatttttttgaaaaggaggaaaatttttatttatatataaattggtatttttagaaatatttttgatatatgtatttttttgtagtgtattttaggtattatcgtgtggtaaatattttttgggggttggtatttgaatagaaaagtgtttttgatgtgtggtagatattttatagatattagttattagttagtgtgttatttttttttttttgtttttgtaattttattttatgtattatttgtattatttggtttttattatttgtgtgattttattttttattttttttcgtattttgttttagttatattggtcgttttgatgttttttgaatatggtaggtattattttattttagggtttttgaattggtatttttttttgtttggtatgtttttttcgtagatattaaggtttttttcgtttttatcgtgaggttttaatttaagagttattttttttatgtttaagattttaattatttttaatattcgatttttatttgttttattttattatttttttttagtatttgtttattatgttaattttatttatttattttgtttatatagtttgtttttttagtttgggtttttttttttttttttttgagatagagtttcgttttgttatttatgttggagtgtatggtgtaattttggtttattgtaattttcgttttttgggtttaagtaatttttttgttttagttttttaagtaattgggattataggcgtacgtcgttatatttagttaatttttttgtattttagtagagatggggttttatcgtgatgtttaggttggttttgaatttttgagtttaggtaatttatttattttagttttttaaagtgttaggattattggtgttagttatcgtgtttagtttttttaatttttaataaatgttagttttataagtataaatatttcgttttgtttcgttttttgttatattttagtatttagaagagtgtttggtatttataaggggtttagtaaaggttggttgtaggaatagttttaattaattagtttttatattttttttttttttttatgtgatttttatattggtgttttaaattattttttttttatttatttatgggataaatttttattgagtatttgttgtttatttggtatatttttagttgttggagatatagcggtgaatgagtagataaaaattgagtttttatgggatttatattttaatgaggagagatagataataaataagtaatttatatagtgtgttagatagtgataaagggtaacgggataaattagggatttggtttgagttttgttgggtgtgtagttttagatggttagggaggggttgattttttttgtttttataagtagtattgttaggaattttttttttatatatgtgtttttgtatagtatattttaagtattatggtgtgataattaatttttaatgaaataatattatttaggtataataaaattaaattatttttagaaatattttttacgtttgtgtttttaagagagtgtattatatatattatagtggttgttttttgggttttttttttttagaaaaagggatttcgttatattgtttaggttggtttggaatttttgggtttaagttatttttttattttagtttttcgagtagttgggattataagtgtatatttttgtgtttagttatatattatagttttgtgaatatatttttttaatgtaataatatagtttttatttatatatataattagtatttttagaaatagtttttatatttatgtttttatagagtatattacgtattttagttttgtgaatatatttttttgaaaaggaggaaaatttttatttatatataaattggtatttttagaaatattttttatatatgtatttttttatattgtattttatatattatagtgtggtaaatattttttgggggttggtatttgaatagagtgttgaaaggaattatgtagagatttgggggtggtgtttaaggtataaagaatagttaatgtaaaggttttgaggttggtttatgtttgttatgtttgaggagttgtgtggtggaattagtgtggttggagtatagtaagggggtgggaaggtataggcggtaatgttagaaaggttatttgttttattattaatttatagttaatatttatttatattggaagggattttagttttgattttttattttataaatgaagaaaaaggtatagagaggaagtggttaaattatttatttaaggttatatagttgttgggattggggggtgggtgggtgttgagagaaggtgaggaatgaagattgttttgtaggtagagggaatagtaagaataaaagtttggaggtgagaattaatttggtttttaaggattgaggttttacgtggggtgggatgagatttaagaggggagttttaaaaattattttgtgttttgagtattttttgggttatttttgagtaaggaatttaatttttttatggtttaatttttttattatttattttatggggttgtggtgaggattaaaggaatttatttatatgaaatattttgtttgatatacggtaggtgtttaataaacgttagtttttattggtattattattattattggcgttaatgtatttatttattgtagtgaggtagaacgtttttgtggttacgagtgtgattaggttgatttattattaagaggtggaggatagggaaggtcgtatagtgttttattataaggaaaagaggattagtacgtttttttttgggaagggaaaaaaaaagagaaggaaattgaaagtatacggtcgatttttttttaattataaagtattggatttacgggagggtatgcgggggattgtgtaagtatataggggtgtgggggaggaaggttaatgaatagatttattgtaaagggaggggtgatgaggtttatcgtttgaggggaaggggagtagaaaattttatagatttttgtattatagtgagaggagagaaaagttattatatagattgatttaaagtagagagggaaaaggttatggattgagttattgaaaatagggagatgtaaagtattaaattaatttattattaaaaaggagagaattttaagcgttagagcgatagtttacgaaaaagaggagatagggtaatggattgatagttaaagggacgtgaatttaaatatgaagattgatttattataaaatggtggtggtggtggtggggggggggggtggttttgaaaaaagttatggattgatgtattgggggattggaggaggtaggaatataaatttaggtagatttattgttaaagagggatgcggaggagtgcggcgttacggattgattcgttacgatgtataggaagggtggaataaataaggttacggacgggttttttgaaagttgaggttaggagaaatttaaatatttagatatatttattattaagggggttgaatattgttataggttagttttttataagtgggggtgggtggggggcgggtgggggtaggggtagggggaaagtttatggacgagtttattttaagttggcgtggggaaaaatataagtacgtagatcgatttattatataacgggagggggaggttaggttacggttagatttattataagggacgaagggtttgagtaatgttatacgtaggtttattagtcgtggtggtggcggcggggagtcgaatattagtaggttatcggttaagttatattttttgcgcgggggcgggaaggatacgtggggttacggattgggttttttattttttaggtttagagtttatttgtgtgtagcgtggcggtggcgttggtaatgttggtagtttcggggggcgggggttttatacgcggttttatcgttttttaggtttgggtttcgaggcggcggtggaggtggtggtggcggtggcggcggtagtatttagaagtcgtttttgcgtttttttatagtttacgtgggttcgaggaggaggagtttaatgtttcgtcgttcgttgattggttaaagcgttattaatcggtcgtaaggtttcgaggggttgggggacgggtttttttttatagagttgtgtcgtgattggcgtaaggggaaatgatggaacgtttacggtttttggagtttcgaggaggcgcgttcggtttttacggtgttttacgtcgattggtttaaggattgacggattgtgagtaattgaaaaggttcggggtttgtgtcgggggggcgggggtttgttttatattgattggtttatatgggattgatggaagatagtttttaaggacgggggtgggtggttttgtttttttttgattggcggacgagggatttttagatttttgttaaaatattaagggggcggtgtcgtacgttatgttgtttagcggaagtagggtttgtatagaaatgggcgtagtagtcggcgggagtgggtcggattgggtttcgcgtaggcgggtagggtagttttacggttagataagattatagagttgggtaaagacgaatttagaatatagcggaggtaggagggtaggatggttgttaggtatacgaaagagtattgagtggtagaaacgaaatgtttttagagggtagggttgaattgcggttagagttaaaaaggggaggaatttggttttgtattgattggcggtggttggatttaatttagaataggggttcgattagggagagcgggatttaggtttgtgtttattggaagttggaatatttataagtaggggttaagataaggtagggttgagttagggtttgggtgtaatttggggtatttggggaatgattgggtgtgtgaaagcgtaaattttagggttttttgattgttgtgggaatgaataaatttttattatgaattggtttattttttatggtaatttaaagggtggcgtttaggaaaaggaatggaagaaagggtgaggtggggggtttaggttgttaagatgatagaagagagggtagtgtataaggttaattggtaaatattgttaggtaataggttggaggtaggattgttggggtattttggaggttttatagagagattggatttttgggttttttagtaattttgtgttttaggaataggttttcgtggtaattagtagggtttatggggaaaaagaagggttatgtgatttaaaggtatttaggttttttaatgtttgaggatggggggaagaagttaatggtgaggtttttttgggaaattttgtaggttttgtagttttttaagtttttgaaaaagaggatagaagagattgaataaagattgggtttgggttacgtttttaggtttgttttgattttttttttttgattttagtttagagggaaagatggttttttttttttttcgtttttttttttttttaggttattattttaaatatagagtttggtagtggggtgagttgtttttatttttagtaatatgtggatatgggttttgatatttatggagtttttggtgaggttgttgttgagtttagagaaaagaaataagaaagggtaaaatgggttttatatgattatgatgatttttttttattattttaagatttatttatattttggatgatttttatttggtttatttttatgtggaaatgttaagttattatttggtttttattgatttaaagattattaaatgtttattgtatgttaggtaattttaggtattgggagatagtagtaaatataataaataaaattttcggtttgatggattttaaatttttgtaaagaaagatataataaaaaattaatggaataaaagttatgtgttagatggttttaattataataataaaaattaaaaatgagagataataaggagtataggagtggggggttgtaattttaaagagggtttagggatggttttacggagaagtatttgagtaaagatttaaagatagtgaattttgagtagtgtggttatatggaggatgtgttttatatataaggggtagtaaatataaaggtattgaggtgggagtgtgtttggtatgtttgaggtgtagtaaagaggttattttggttggagaagaataagtgaagggggaatgtaagaggtgaggttagagaggtaatgagggagataaattgtgtgaagtttataaggttatggtaaggattttggttttgattttaagtgagatgggagttaagggaaggttgtagtagaggaaggaggttgaattatatgaattagttagttgattttttttttttaagttagtttggattagatttcgtttaaaagaattttaattgatataaagggttaaggaaggttttttttaagaatgaagaatgagaaggaatcgaagaatgtttaatggttaagtagtaggaaggttttttttataaaaaggataagaggtaataaagagttgtttgagaagtagtgaggttagagtgttagaaattgagtggggagggaaagtggtttaagataaggtttaagagataggaagaggttagattatatagggttttaatataataaggaatgtggattttattgtgttgttaatgtaggagttagtttgaggggtaaatgaaattaaatattgttggaaaagtagagagtaataagataggatgttaaattggaaaaaaaagtagtatgaatttatgtatatattaatattttttatatttttatttttagtttagaatttttttttgaatttgattagttttaatgatattttttaaaaatttattttagtgtttaataagtgttttatatttaataggttttagattaaatttttgatttttttttttaaatttattttttttttaatttttttattttagataatggtaattttatttttttagttgtttagttaaaaatttgggttttttttttttatattttatatttagttagttattttttttaaaattatgattgttttattgtaggtaatgtttttgatttttatgatatgttttttttatagtattgttaatatttgatatattatattatttatttgtttattgtttgttttttttgattagaatgttagttgtatgagggtagattttgtttttttttgttttttgttttatttttagggattagaatagtgtgtggtatagaggaggtatttaacgtatgttgaatgaataagtgattattttattaaaaggaatttgaggttggttgagtgtatgtttagggataggaaataaatgaagtatgggtgttgttgttagagagtaagaatatttttaagaatattttgggggtaatgtttaaagaatagaagaatgaatttgattagtttttaagggataattttaatattaaaaaagagaataaaattagttaatggtgtaagtttattttatgaaaatttatgagtttaatattttaaaagggagaaaaatatagagtttattaaatgttagttgtaatataaaagggatatgtttattattgttgatttatttttatttgttatgtgagaagtaaattattattgatttagtatgtaaggtagtgtgaatagttatatggttatgtttttttttttttttttgagatggagttttattgtgtcgtttaggttggagtgtagtggcgtgatttcggtttattgtaatttttatttttcgagtttaagcgatttttttgttttagttttttaagtagttgggattataggcgtttgttatcgttttcggttaattttttgtatttttagtagagacggggttttattattttggataggttggttttgaatttttgatttcgtgatttatttatttcggttttttaaagtgttgggattataggtgtgagttatcgcgttcggtcgttaggttgttttttttataattatatgtttatttatgagatgtggatgtgtatttttttttgtgttattaggaaagaatatagagattttattttttttattttttaaataaagaaatatattaagaataggaagaattgatatttttgattatataaaatgattagaaagttagtttaaagtatattttaagtaattaaatatttttaaaggatagttagttatatagatttaaatttttattttttagaaaaattaaatttttagatagttttattaattataataaagtagtaagatttaattatattttttattatattaatagattaggttagtatattaaaaagattaggtaagggggtaggtattgataatttaaatattttattttggggaagtacgtggagttttaaaatattaaaatttatttgataggtttaggaattttgtgatataataaggaaagtttttttatataaattagattttagttgggcgcggtagtttatatttgtaattttagtatttagggaggttgaggtgggtagattatttgaggtcggagtttgagattagtttggttaatatggtaaaattttgtttttattaaaaatataaaaattagtcgggagtggtggtgggtgtttgtagttttagttatttgggaggttgaggtaggagaattttttaagtttaggaggtagaggttgtagtgagttaagatcgtattattgtattttagtttgggcgataagagtaaaatttcgttttaaaaataaagtggatttggtttaaatgattattagtttagaattgtgttgattatgaaagtaggtcgtttaattaaattatttgttaattggtttgaatattaagaattagaaattttagtaggtttgaggtttttttgggtttattagtatttgttagttttttttatggttggaaaggtttgaaaagataaaaattattgaaattttaagggaggtaattttggaaaaaatgaatgtagaatagatataaatataaaatataattaataaagaagtttaaattaatggtatttatatttgtgagatgttgttaatttaagtgtattgtttagtgttttt

SEQ ID NO: 155 - DNA, 3120 bp, Artificial Sequence
  chemically treated genomic DNA (Homo sapiens)
aattttaagtttaggtcgggtatagtggtttacgtatgtaattttagtatttggagggatcgaggtgggcggattataaggttaggagattgagattattttggttagtatggtgaaatttcgtttttattaaaaatataaaatttagttgggtatgatggtacgtgtttgtagttttagttatttgggaggttgaggtaggagaatcgtttgaattcgggaggtggaggttgtagtgagcggagattgtattattgtattcgtttggtgatagagtaagattttattttaaaaaataaataaagaaaatttgaagtatagtatttttttaaattttaaatagataatagaaattggtttttttttatttaaattagaatttaagtttaattttatatatttttgatagtttggattttgttttttaattttataaaattgggaatttaagtattatttggttcgatttaaatgtaatgtagaatttgtattaaaatattatattaaagttttagatttgtagtagttaatagtatttttatgtatgtgttagggattgttttaaatattttatatatattaatttttttattttgtatttttgttttcgttttatatagtaggaaattgaaatattgagaggttaagtaattaaagttatagagttagagtgataggagtaaagttttaatttaggtaatttagatttttagagttttgatttttattattaagttgttagtatagtttttttggtaattatttttaatttaaatataattcgagtgatttatttaataagttattattttgataatttagtgatttgtaatgtaaaattatttattgtaatttatttaatattattgtttttttgtgttgtaaaaattatagtaatcgagatgtaatttattatttttttttttattttcggtattttgtgttaatttttttgttttgcggatttttttcgattttttattatgcgtgttaattgttattaatttttttgtttgttggggattggggtcgcgagggtatattttcgaggggtacggggttagggttaggtaggttgtgcggttgggcggggttttgtgttttattgcggagtgcgggtcgggaagcggagagagaagtagttgtgtaattcgttggatgcggattagggcgttttttattttcgtcgggagttcgtcgattggttgggtgtgggcgtacgtgatcgatatgtggttgtattggtgtagttcgttagggtgttattggagatagaatggaggtgttgtcggattcggaaatggggtaggtgttggagttattatggttaggtttgttgcggggggaggggggaaggtggttttttttcgtattgttttaaatcgatggtttttttttggtatagggtttattgtagtatgttaaacgaggaggtaggggcgtcgttttttcgttttttattgtagtattggagatggattttttgtatttcggatttagggtttttgatagaagaggaagaagggggaggggtagaagtgttaaggggagtttgttgagaaaagttgtttttgaagttagaaggggtttttgtttttataatgttatttgatagagtggaataatagtatttaaggaaacgggtagaggataataaagaatggagtatatttatggcgaggagtaaaagttttattttattgaaaggtttttttttttttttggcgataaggatatatgtattggtggttaaaagagagaggagataaaatcgttgtagatggttgatgtgaatttagtggaaagagttattggggatgagagaaagaggaggaggtaggtattgtagagcgtgagtggtggtgttggttggtgaaatattggttattagtagtgtgtttgtttttgtaaaatatttaagtaaattttttgtgaatagggtggtaaatagatattagtgtttttgttagttataaaatgtagtggtagtggttttttgcggacgattgtagtagtgttttttttttttttgttaggtcgaaaagataattgtagaggaataagaaattttgtagtaaatgttggggtagaagtttatttataagaagttatagtttataaatgtagtttgaatagtagaaaaaaaattattgttttttaaagtaggaataatgttaggttatgaatgttttgttattggaatgtattggatattttgattttatattacgaaagtgatgtttaaattttttgatttaatataaattttatacgaaattttaataaattatgtatgaaatagtggatttttttttttgttagtgaagtttttatgttattaattaggttatttaagagtaaattattttataacgtaaattattttgttaaaaattatggtgaataaatttttgtaggtttaatatttaagatttatagttaagtaattttatatttttttttggttgtttttagataatattgaataaatatttaagatattaatttagtgtgtaaatattttaaattaaagtaatatggttttttttttagatgtatttttgtttagtgagtatttatgagatatatttttgatataaagtgttttttattgagttttttttttttttatttaaatgtaaaagtttatttttatgtatatttatagtagttagtttgttatatttttttattttttgaataaggatggtagtggttttgtaaagttttttagggttagtgatagtgttttttaaataatgtttatgtaatagaaagttttaagatgatttattatattgttttagtaatatttttaagataatgcggaattgggttggtttagataaataagattatataagttttttattgataaatttaaatagttttttaaaaaattatttttgttttaagaattatttgattatggatattagggttaatagtatttaggagtcgggcgtggtggtttatgtttgtaatataagttaaataggaggttgagggaagttgaggtaggaggattatttgagttttggcgtttaagattagtttgggtaattaagtaagattttattttaaaaaaaagtatttagagttttttttttaaaatttgat

SEQ ID NO: 156 - DNA, 3120 bp, Artificial Sequence
  chemically treated genomic DNA (Homo sapiens)
attagattttaaaaaagagattttaagtatttttttttgagatagggttttgtttggttgtttaggttggttttgaacgttaaggtttaagtgatttttttgttttagttttttttagttttttgtttagtttgtattataggtatgggttattacgttcggtttttaagtattattaattttgatatttatgattaagtaatttttaaagtagaaataattttttaaagaattatttaaatttattagtgaaaaatttatgtagttttatttatttaagttagtttaatttcgtattattttgaaaatattattgaaataatataataggttattttaagattttttattatataaatattatttaagagatattgttattgattttggagggttttataaagttattgttatttttgtttagggagtggggaggtgtggtaggttggttattataagtatgtataaagataggtttttatatttaggtaaaggaaaaaaaagtttaatgaaaaatattttatattaagagtatattttatgagtatttattaaatagaaatatatttagaagaaaagttatgttgttttaatttaaaatatttgtatattgaattaatattttaaatatttatttagtgttatttaaaagtaattaaagagaaatataaaattatttaattataggttttaaatattaggtttataaaaatttgtttattataatttttgataaagtaatttacgttgtaaagtggtttgtttttgaatgatttaattaatggtataaaagttttattaataaaagaaaagatttattgttttatatataatttattaagatttcgtataggatttatgttaaattaaagaatttgagtattattttcgtgatgtagaattaaagtgtttaatatattttaatgataaaatatttatagtttgatattatttttattttaaaaaatagtaattttttttttgttgtttaggttgtatttataaattatggttttttgtaaatgggtttttattttagtatttgttgtaaggttttttatttttttgtagttgttttttcggtttaatagagggagaaaaagtattgttgtagtcgttcgtaaaaagttattattattgtattttgtaattaataaagatattggtatttgtttgttattttgtttatagggagtttatttagatgttttataaaagtaggtatattattggtgattagtattttattaattaatattattatttacgttttgtagtatttgttttttttttttttttttatttttagtagttttttttattagatttatattagttatttgtagcggttttgtttttttttttttttggttattaatgtatgtgtttttgtcgttagggaggaaaagaagttttttaatggggtagagtttttgtttttcgttatgaatatgttttattttttgttgttttttattcgtttttttagatattgttattttattttgttaaatggtattataaaaataaaaattttttttggttttaaaaatagttttttttagtagattttttttaatatttttatttttttttttttttttttttttgttaaaaattttggattcgaagtataggaaatttatttttagtgttgtagtggggggcggggggacgacgtttttgttttttcgtttggtatgttgtagtggattttgtgttaaggaaaggttatcggtttaagatagtgcgagggaaaattattttttttttttttttcgtagtaagtttggttatggtggttttagtatttattttattttcgagttcggtagtatttttattttgtttttagtgatattttggcgggttgtattaatatagttatatgtcggttacgtgcgtttatatttagttaatcggcgggttttcgacgggaatggggagcgttttggttcgtatttagcggattatatagttgttttttttttcgtttttcgattcgtatttcgtagtggggtatagggtttcgtttaatcgtatagtttgtttagttttagtttcgtatttttcgggggtatgttttcgcggttttagtttttagtaagtaaggaagttgatggtagttgatacgtatagtaaagagtcgggggaggttcgtagggtagaaggattagtataagatgtcggaggtgggagggagagtaataaattatatttcgattgttatgatttttgtagtatagagaaataataatattaaatgaattataatgaataattttatattataagttattgagttgttagagtgatgatttgttagatagattattcgaattatatttgaattaaaaatagttattagaaaagttatgttagtagtttagtagtggagattagaattttggaagtttgggttgtttgagttgaagttttatttttgttattttagttttgtaattttagttatttaattttttagtgttttaattttttgttgtataaaacgggaatagaagtatagaatagaggagttaatatatatgaagtatttagagtagtttttgatatatatatagaagtgttgttagttattataaatttgaggttttaatgtagtattttaatgtaaattttatattgtatttaaatcgaattaggtgatgtttaaatttttaattttatgaggttgaaggataaaatttaaattgttaagaatatataaagttaaatttaaattttggtttaaatggggggaaattagtttttattatttatttaaaatttaaaaggatattatattttaagttttttttgtttgttttttgagatagagttttgttttgttattaggcgagtgtagtggtgtaattttcgtttattgtaatttttatttttcgggtttaagcgatttttttgttttagttttttaagtagttgggattataggtacgtgttattatgtttagttaagttttgtatttttagtagagacggggttttattatgttggttaggatggttttaattttttgattttgtgattcgtttatttcggtttttttaagtattgggattatatgcgtgagttattgtgttcggtttaaatttaaagtt

SEQ ID NO: 157 - DNA, 2501 bp, Artificial Sequence
  chemically treated genomic DNA (Homo sapiens)
ttatacggttagaaagggtttaggcggttttcggcgtttttttagtttttgtttttatggcgtattttttcgttagtcgttttttttcgtatttcgtcgttcgttcggttcggtcgcgtgcggtttttcgggagtttttatttcgtcgcggattttagcgattattaagttcgtacgcggtttgtcgtaggtttgagtagaaggtttcgcgtatatttatcgcgtcgcggtcgcgcgggaggtttgtgtcgttcgcgttatttattggtcgggtttcgcgggcgtagcggagcgggcgggtggtcggttcggacgcgtttttttcggtcgcggtttcgcgcgttatgtgttttcggcgggacgcgttattttcgggtttgtcgcggcgtttttaattcgggttagggagcggggcggagggggcggtcgggtggtttagaggagggtttttttttttttttttttttgaatgaatcgtgtgacgttacgtataggaaatcggtcgggttgtgtagagaatgaagtaagaggataggtattatagtttcgttttcgttttttttttttcgcgttcgttttttcgcgtcgtttgttcgttcgttcgtcgcgttttcgttcgtcgtttttcgtggtttcgtcgcgttgtcgtcgtcgtcgttgttagtagaaggtgtcggggtttcgggttttttttgtcggcggtcgttagcgttcggagcgggttgcgcggcgggagtttcgggaggcggtcgtagttagcgtcgtcgcgtaggattaggaggaggagaaagggtgcgtagttcggaggcggggtgcgtcggtggggtgtagcggaagagggggtttaggggggagaatttcgtagtagttattttttttaggaaaagagggaaaaaataaaatttttttttattatttttttttttttatttttcgtcgtattatatatagcgcgggtttttagcgttcggtatcggcgggttaggcgcgttttgtttttatttatttagtagtttttcggaaaatgtatttgttgttcggagtttaattagaagaggatttttgttttcgttttcggtttttttatcgtttttttttttttgttttttttttggggaggcgtgaagcggtttcgtggatagagatttatgtttgtgttcgcgcgtgtgtgcgcgcgtgtaaattgtcgagaaggggaaaatattataggatttttgcgaatatcggattgaaaattgtaatttatttgtcgtcgtcgttgttttttttttttttcgagtttttgagattttcggttgggatttttgcggattgatatttttgtgaagtagaagtttgggaatcgatttggaaatttttttaatttttatttttttttttcgcgatttttgatttattgggaagttttaaattagttataattggagagtgttgaagattgatgggatcgttgttttatgtatttgttttggttttataaaaaggaaatttgatagaggattatgttgtatttaaaaaatataagtaagttttttgtataggaaattggtttaatgtaatttttaatggaaatttttgagattttttatttaaagtgtattcgagtaaatttaatttttaggtagtttaatatattttttttagtcgtgttatttgtagtgtgtatgttttgtttttatttagtgtgtatagggaaacgtatttgattttttatttattagtttgttttttttttaattttttagtattatagaggaagtagattgatattaataatatttattaataataacgtgttttatgaaataaagattcgaaaggaattggaataaaaattttttgtattttatgttaagggggaaatattagaattaagtgtttcgcgtgattgaagatattttttcgtttaagaatgtaaagtatatttaataaaatagttggattataattttttttttttttttgggggtcgtggggtgggagttggggcgagaggtgtcgttggttttcgttgttttttttttgggaaggatggcgtacgttgggagaatagggtacgataatcgggagatagtgatgaagtatatttattataagttgtcgtagaggggttacgagtgggatgcgggagatgtgggcgtcgcgttttcgggggtcgttttcgtatcgggtattttttttttttagttcgggtatacgttttatttagtcgtatttcgggattcggtcgttaggatttcgtcgttgtagatttcggttgttttcggcgtcgtcgcggggtttgcgtttagttcggtgttatttgtggtttatttgatttttcgttaggtcggcgacgatttttttcgtcgttatcgtcgcgatttcgtcgagatgtttagttagttgtatttgacgttttttatcgcgcggggacgttttgttacggtggtggaggagttttttagggacggggtgaattgggggaggattgtggttttttttgagttcggtggggttat

SEQ ID NO: 158 - DNA, 2501 bp, Artificial Sequence
  chemically treated genomic DNA (Homo sapiens)
atgattttatcgaatttaaagaaggttataatttttttttagtttatttcgtttttgaagagtttttttattatcgtggtaaagcgttttcgcgcggtgaagggcgttaggtgtagttggttggatatttcggcgaagtcgcggcggtagcggcgggagaagtcgtcgtcggtttggcggagggttaggtggattataggtggtatcgggttgagcgtaggtttcgcggcggcgtcgggggtagtcggggtttgtagcggcgaggttttggcgatcgggtttcgggatgcggttggatggggcgtgtgttcgggttgggaggagaagatgttcggtgcgggggcggttttcgggggcgcggcgtttatatttttcgtattttattcgtagtttttttgcgatagtttataatggatgtattttattattatttttcggttatcgtattttgtttttttagcgtgcgttattttttttagaggaaaagtaacgggggttaacggtatttttcgttttagtttttattttacggtttttagagaaagaagaggagttataatttagttattttattggatgtgttttgtatttttggacgagggggtgtttttaattacgcggaatatttgattttggtgttttttttttggtatgagatgtaggaaatttttattttaatttttttcggatttttattttatgaggtacgttattattagtaagtattgttaatattagtttattttttttgtgatgttgaaaggttaaagaaaaaataaattaataagtaaaaaattaggtgcgtttttttgtatatattgagtgaaagtagggtatatatattataagtaatacggttaaaaagaatgtattaagttgtttggaaattaaatttattcgaatgtattttaagtaaaaaattttaaaggtttttattgaaagttatattaaattaattttttgtgtagagaatttatttgtattttttaagtatagtatgattttttgttaagttttttttttgtaaaattaaaataaatgtataaggtaacgattttattaatttttagtattttttagttatagttgatttgaaattttttaatgaattaggagtcgcggggagagggagtaaaaattaggaggatttttagatcgatttttagatttttgttttatagaaatgttaattcgtaggaattttaatcggagattttaagagttcgagaaaaaaaaaaggtagcggcggcggtagatgaattataatttttagttcggtattcgtagaagttttgtgatgttttttttttttcggtaatttatacgcgcgtatatacgcgcgggtataggtatgaatttttatttacgggatcgttttacgtttttttaggagagagataggggagaggggacgatgaaggagtcggggacggaggtaggaatttttttttgattaaatttcgaatagtaaatgtatttttcgaaaagttgttggataaatgaaggtaggacgcgtttggttcgtcggtgtcgagcgttagaagttcgcgttgtgtgtggtgcggcgaggggtggggagaaggaggtggtgggggagggttttattttttttttttttttttaaaaaggatgattgttacgaagtttttttttttggattttttttttcgttgtattttatcggcgtatttcgttttcgggttgcgtatttttttttttttttttggttttgcgcggcggcgttggttacggtcgtttttcggagttttcgtcgcgtagttcgtttcgagcgttgacggtcgtcggtagggagggttcggagtttcggtattttttgttggtagcggcggcggcggtagcgcggcggggttacggagagcggcgggcgggagcgcggcgggcgggcgggtaggcggcgcggaggggcgggcgcgggaggaagggggcgggagcggggttgtggtgtttgtttttttattttattttttgtatagttcgatcggttttttgtgcgtaacgttatacggtttatttaaaaaaagaagaaagaaagagtttttttttgagttattcgatcgtttttttcgtttcgttttttggttcgggttaaaggcgtcgcggtaggttcgggagtggcgcgtttcgtcgggggtatatggcgcgcggggtcgcggtcggggagggcgcgttcgggtcggttattcgttcgtttcgttgcgttcgcggggttcggttagtgggtggcgcgggcggtataggtttttcgcgcggtcgcggcgcggtgggtgtgcgcggggttttttgtttaggtttgcggtaggtcgcgtgcggatttggtggtcgttggggttcgcgacggggtgggggttttcggggaatcgtacgcggtcgggtcgggcggacgacggagtgcggaggggggcggttggcgggagggtgcgttatgaaaataagggttggaaaagcgtcgggaatcgtttggattttttttggtcgtgtga

SEQ ID NO: 159 - DNA, 6104 bp, Artificial Sequence
  chemically treated genomic DNA (Homo sapiens)
tagttttgaagtaggtagatatgtttatatttttttttgagttagtgtttggatttaggggattagattttttatttgatatggtagagagataagttatgttttaggtttttaaaaggagtttggaaaatataattaatttaagttaaatatttttattatttttttgtatatataataaagataaaaatatttattttattaaattgttgagagtaagaaagataatatatatatagtgtttggtatacggatggaatttagttgatggtagttataatatttataatattttttttttgttttaatttaatatgatttatatgattttttatatttattgtatatgtaatattttttagataattttatatttaggttattagtaaaatattgatattttttttagtatttatatagatgttttttttttaaagtttttagtaaaatttttattggggaattttagttgttttttatttttttttttttttatttttatttttatattaaaggtttttatttttaaggtatataatatgatattttgatatatgtatattttgtgaaatgattgtaataattaagttaattaatatattattattttatatagttttttgtgtgtgtgtgtgtgtgtgtgcgtttagagtttttgagatttattttttttgtaaattttaagtatatgttaattatagttattaggttgtatattaggtttttagaatttatttattttataattgaaaggttgtattttttaattagtattttttttttatttttaatcgtagttttaaataattattattttaatttttgttattgagttcgatttgttttttgagattttatatataagtgagattatgtattacgtgtttttttgtgttttatttattttgtgtgttataatattttttaggtttagttatgttggtataaatgataatattttttttttttgaataatattgttgattaatattttattgtgtgtgtgtgataaatatatattatattttttttaataatttatttattaatggatatttaggttgtttttgtattttggttattgtgaatttcgttgtttttttggtagttatttttgtatttttttttttagaagtagttttattgtagtttaaaagtgttttaggaaaatgatttagaagtaattattttttttggtatgttttttagtaaatacgatgatggaaagttttgatttttgtttttttttaaatagtgtaatcgatttttagttgggattttttttagttaatttgatagttttacgtttttattaggttgaagaaaatgtatgtgttgtgggttgttgtattattgttgttggtggtgttgttgttattgttgagattttgtggttgagtttatattataaaggaattgtagagtagtaataaatttaatttgagttttgaatttaagtttttaggtgtgatttttttaattacgtggaaatttacgtaagaatttttaattagattttatgtttatttttattttttaagtaaagggtataggaatttggtttaaacgaatgggaataaatattatagttagattttattggagtgttgtaaaaatgtttttttttaaaattagattgttttaaaattgattttggtttttagatttttaagttaggaagtaagatagtaaaaattaagggttaaatagttaagcgattatttttttaaaattagtattttttttggcgattttcgttagattatgttttgtttagtattgaaatttagagaagttttaggaatagcgggatgaaatttaagtgattcgtttacgggaagttttatttttttttcgttcgtttagtaaattcgggatgggtttagagaatgatttcgtattttgtattagaagattttagtttttagagagaattttagacgaaatttttatttttttgttttatttttgaaaatttttatttgggaatcgatttgttgtgataaataaaatgggaggagtttggttgaatagtttgtggatttcggaaagtaaagcgaaatgtcgttttaattaggttcgaattttttgtaagttattttgtgaaattggtgaatttgttagaatgaatttttatttatttaattttggcggatcgtttattagggtgtttggtatggtgttaattgttggagaaaatgatttttaaataaaaacgaaaaaaattttcggtttttagtaaggagttaggtaatttttataaatttaaggagtgtttgagaggtgagttaatgatcgttttttttgttttaaagagatagatttttatagttagttttgaaattgttcggggttatattagcgttttttggacgtagattttggttagcgttttacggtattagtttttgatttgtagttgttaaagatttgatagtggggagtacgtgtttattttgaaggttgaagatatatattatagttaggagtagaatttcgattttttaaagtgatatggttataaaatttgcgtttattggtttttattttgcggttatcgtggtacgggcgaaagttatgaattttttttttaggaaaatatatattatagatatatatatttataaacggttttaggaggtttttatgttagaaatttttggttttggaaaaaaattattttcgttgaagtatgtggtagttgagcgtaaatatttttttgttatagttttagtggtagaggtttaagtattacgttttatttagtgttcgtattgcggttttcgtaattttttaagtagttttgtatcgaaaatttaggtcggagattcgagtttaaattgttgaaaagttttaaggtttcggatagggttttagtaggggttatttttttttaggattcggggtttattgtgtttaagattcgttatttaagttttgttttgcgcgtacgttgtttgttttacgttttgcgttgatacgcgtcggtgttttttcgggttagttttagtttcgggttttgtggtcgttttgtcggcgattttgcggagagcgagttttagatatttagtttttagtttcgagttgttattttttcgttgtagttaagaaggaggagattaattaagggtattttagaagttaggcgttttcgttgttttttttgagtacggaggttattaattttttagggggaagagatgtagcgcgaggtaggggtgtcgtgttaagaaatttcgacgtttttggggattgaggataaaggtgcggatacgatttcggggtatttggagtttcgtgattcgcgttacggacggtatatttaggggttaatttttgttttgttttaaagaattttaagttagagtttttgttttcgtttatagtttcgggatgtcgttgttgcgtttatcgtataggtagcgttcggatcggttgtagtagatcgcgcgttgcgcgttttatcgggagatggtggagacgttgaaaagttttttttttgttattttggacgttgtgggcggtaagcgttttagtttttatttttgttgagttgaacgtttaggtatagtggaattgaaattcggttttgcgggatgtgagagttgttgaggttacgcgtaattgggtgtgatggagggcgtttgttcgtgatgtgtgtaggtttgatgtaagtaggttatcgtcgtgcgagtgtgtggatgcgatcgttcgagagattcggaggtaggtttgggatacgtttgagtgaatattttaggatatttttttggttagtatttgttttttagtgtttgtgatttagagtgggtatatgttgggagatagtaatgggtttgggtgtgtgtaaatgagtgtgatcggaagcgagtgtgagtttgatttaggtagggattatatagtattgttatatttgtttgttttttagtagaggattgaagtgcgggggtgggggtacggggtcggaatagaatgtttttgggatattttggtaaatagtagtcggaagtaaaggggtagttgtgtaaacggtttaggtaggtgatggatggtagggtaggaagggggaggtttagaggtttggatggaggttttcgtatttgtattttgtaatttattttttaggtttagtaggttatcggttttttttttatatatgtaatggatttgaagagtatttcgggatagttcggggagatggagattcggaaagtatttatggagattttatagaattttttgtgcggattaggaaatttttgtagatttttgtttatttgaggtttaggcgttgggttgttttttataatatttttttaagatgagattgtggtttttattttaaagatgagtatattgagtttttgtgaagttatttgtttatgattatataattaggaattgggttaattgtaattgaatttttgtttaataaagtttttgtttttagtttcgttttttgttttttacgagttttggttttttgtgggtaatattagttattggagttagattttttgggtttagaatttatttttaggggtattaatttttaaaattttatttgggtaggggtttgggattagagttggaagagtttttataattttggatttttttcgttaaatcgtgaaattaggggtggagtggggcgagggtttaaaattaggtcggattgagaggtgaaatttattatgacgttaaattgtttttaaattttcgtttattttaagggcgttatttgttggtgtttttattattttttattatttttattaatgattttaatgtaaatataagtgggacggttttgttggattttttaggttttggaagtatgagggtgacgtaatttaggggtaaaggattttttcgtttattggttgttgtgtattggcggaattttttcgatttatagcggcgggaataagagtagtcgttggcgttgggaggtattagagatattgtttagtttaagtgtcgtcgtcgtttttatagggttttgttggacgtcgtcgtcgtcgttgttatcgtttttgatttaagttatttttcgttaggtgagtttcgagattttggtttaggtatatgtttttttttttttttttttttattcgttatttttttatttttttttttttttttttttttttttcgttagtttttttattagatagtttttgttagttcgcgatttatattaggttcgtgttttaggttggatcggatagttttaatttttcggttcgttttttttgttcggttgcggattttagttttattttttcgtattgtatataggtttaggttagtttcgggatatttaggttttttagggatcgcgtatagagtttgaggtaagagaaatttttcgtagacggtgcgattagggacggcgtttggagtttagtagttttagggaaattggtttagaatttggaatagagcggatgggtggtaaataggtacgacgattgagggataagtagttttaaattgtaagttttagttataggttttgggagtaaagagagaaagttttgggttttaatttaagagtaaaatttggtttttgtaggggattgaggtgttagtaggcggagtttaggttgagtattaaaattgatttttttattttttagattttaattgtagagataatttttgtggatagattttattttttttattaaggtgtatgtaaaagttttagaagaggaggatagttttgggtttttttatgggattagtttttgtgataggggtttgggagtatgttttttatagagatttggttaataggtttatatgtatttgtgtggttttggggagaagggtaggattgagattttttttatttagttttttttttaggatcgtttttttagttttattagattgtgtatgttataggtttattgaattttttagaagtttattgtgttgatgaggaaataaaaaagaagagaaatataatgattagtttgaagttataaagttagagcgttagaagtaagatagaaaattaggataggagttaaggtttgtgggtttttagaatttcgaattggcgtaggtggtttattttattttttttttgtaga

SEQ ID NO: 160 - DNA, 6104 bp, Artificial Sequence
  chemically treated genomic DNA (Homo sapiens)
tttgtaagggaagaatgagataaattatttgcgttagttcgaagttttaggagtttatagattttggtttttattttggttttttgttttgtttttaacgttttggttttgtggttttagattggttattatatttttttttttttttgtttttttattagtatagtggatttttgggaggtttagtgggtttgtagtatgtatagtttgatagagttggaggagcgattttagagggagagttgagtgggggaggttttagttttatttttttttttaaagttatatagatatatataaatttgttagttaggtttttgtggaggatatgtttttaggtttttgttatagaagttgattttataaggaaatttagagttgttttttttttttggggtttttgtatatattttggtgggaggggtgggatttatttatagagattatttttgtaattggaatttgagaaataaaagaattaattttagtgtttagtttaagtttcgtttgttggtattttagttttttgtaggaattaagttttatttttaaattgggatttaagattttttttttttgtttttagagtttgtgattggggtttgtagtttagggttgtttgttttttagtcgtcgtgtttatttgttatttattcgttttgttttaggttttgaattaatttttttgggattgttgggttttagacgtcgtttttgatcgtatcgtttgcggaaagttttttttgttttaggttttgtgcgcggtttttggggagtttgagtgtttcgagattggtttaagtttgtgtgtagtgcgagagagtaagattggagttcgtagtcgagtaggaagagcgagtcgggggattgagattgttcgatttaatttagggtacgagtttggtataaatcgcggattaatagagattatttgatgaagagattaacggagagagagggagaggaggaaagggagtgagaaaatgacgaatggagggagagggagggagagatatatatttgagttaggatttcggggtttatttggcgggaggtggtttggattagaggcggtggtagcggcggcggcggcgtttagtagagttttgtggaagcggcggcgatatttgggttgggtagtgtttttgatgttttttagcgttagcgattgtttttattttcgtcgttgtgggtcgggaaagtttcgttagtgtatagtaattaatgggcggaggggttttttgtttttgggttgcgttatttttatgtttttagaatttggaggatttagtaggatcgttttatttgtatttgtattgaggttattgatggaaatggtgggggatggtgggggtattaataagtaacgtttttaaagtgagcgggaatttgagggtagtttgacgttatggtgaattttattttttagttcggtttggttttgaattttcgttttattttatttttggttttacgatttggcggaaagggtttaggattgtagggatttttttaattttgattttagatttttgtttaagtgagattttaaaggttaatgtttttaagggtgggttttgggtttaagaaatttgattttagtagttggtattatttatagagggttagggttcgtgggaaataagagacggagttgggagtaagaattttgttagataggagtttaattatagttggtttaatttttggttgtgtgattatgggtaagtaattttatagaggtttagtgtatttatttttgaaatggggattataattttattttgaaggaatattgtgagaaatagtttagcgtttgggttttagataggtagggatttataagagttttttggttcgtataggggattttgtaagatttttatggatatttttcgaatttttattttttcggattgtttcggggtattttttagatttattatatgtgtgaggagggggtcgatgatttgttgggtttgaggggtgagttgtaaggtatagatgcggaagtttttatttagatttttggatttttttttttttattttgttatttattatttgtttgagtcgtttgtatagttgtttttttgttttcggttgttgtttgttaagatgttttagagatattttatttcggtttcgtatttttattttcgtattttagttttttattaaagagtaggtaggtgtgatagtgttgtgtggtttttgtttagattaagtttatattcgttttcggttatatttatttatatatatttaaatttattattgttttttaatatgtgtttattttgaattatagatattaaaaaatagatattggttagaagagtattttgaggtgtttatttaaacgtgttttaagtttgttttcgagtttttcgggcggtcgtatttatatattcgtacgacgatgatttgtttgtattaaatttgtatatattacgaataggcgttttttattatatttaattacgcgtgattttaatagtttttatatttcgtagaatcgggttttagttttattgtgtttgagcgtttagtttagtagaggtagggattaaggcgtttgtcgtttatagcgtttagagtggtaagaaagaagttttttagcgtttttattatttttcggtggaacgcgtagcgcgcgatttgttgtagtcggttcgggcgttgtttgtgcggtgagcgtagtagcggtatttcggggttgtgggcggaggtaaggattttagtttgaggttttttgaggtagagtagaaattagtttttaggtgtgtcgttcgtggcgcgagttacggaattttaggtatttcggggtcgtgttcgtatttttgtttttagtttttagaagcgtcgaaattttttagtacgatatttttgtttcgcgttatattttttttttttagggggttggtggttttcgtgtttaaaggaggtagcgggaacgtttaatttttaagatgtttttaattgatttttttttttttaattatagcgagggaataataattcggggttggggattgggtatttaagattcgtttttcgtagggtcgtcggtagggcggttataggattcgggattggaattggttcgggaggatatcggcgcgtgttagcgtagagcgtgaaataggtaacgtgcgcgtagagtagggtttggatggcggattttgggtataatgagtttcggattttgaaggaagataatttttgttgagattttgttcggagttttggagttttttagtagtttaggttcggattttcggtttgggttttcggtgtagagttgtttgaagagttgcgaaggtcgtagtgcgggtattgagtggggcgtagtgtttgggtttttgttattggggttgtagtagaagggtatttgcgtttagttattatatattttagcggaaatgatttttttttaagattagaggtttttaatataagaattttttgaaatcgtttgtaagtgtgtgtgtttgtgatgtgtgtttttttaaagagagagtttatagttttcgttcgtgttacggtgatcgtaaaatgaaagttagtagacgtagattttgtggttatgttattttgaggggtcggaattttatttttgattgtggtgtgtgtttttagtttttagaatagatacgtattttttattattaaatttttggtagttataaattaaaggttggtgtcgtggggcgttaattagagtttgcgtttagagggcgttagtgtagtttcgagtagttttaagattgattgtaaaagtttgtttttttaggataggagggacggttattaatttattttttaagtattttttgagtttgtaggaattgtttggttttttgttgggggtcgaaagtttttttcgtttttgtttgaaaattattttttttagtaattagtattatgttaggtattttagtagacgattcgttaaagttaaatgaatgaaaatttattttggtaaatttattagttttataaggtagtttgtagaaaattcggatttagttagagcggtatttcgttttgtttttcgaaatttataaattatttagttagattttttttattttatttgttatagtaagtcggtttttaggtagaagtttttaggaatgaggtagggaagtaaggatttcgtttagggttttttttaaagattgagattttttggtgtaaaatgcgaagttattttttgagtttatttcggatttattgagcgagcgaaggaagggtagagtttttcgtgagcggattatttagattttatttcgttatttttggaatttttttgagttttagtattaaatagagtatggtttaacggaagtcgttaaggaaaatgttgattttaaaaaaatagtcgtttgattatttgatttttgatttttattgttttattttttaatttaaaaatttggaaattagggttagttttgaaataatttgattttggaaaaaaatatttttataatattttaataaagtttaattgtaatgtttgtttttattcgtttagattagatttttgtattttttgtttaagaaataaaaataaatatgaagtttggttgaaaatttttacgtgaatttttacgtgattaaaaaagttatatttgaaggtttgagtttagagtttaagttaaatttattattgttttataatttttttataatatggatttaattataaaattttagtagtagtaatagtattattagtaatagtaatataatagtttataatatatatattttttttagtttggtagaaacgtggagttattaaattaattggaaaaaattttaattgaaaatcgattgtattgtttaaagaagggtagaaattaaagttttttattatcgtgtttattgaagaatatgttaagagaagtagttgtttttgaattatttttttaagatatttttagattgtagtaaagttgtttttggggaagggagtatagaaatggttgttaaagagatagcgagatttataataattaagatatagaaatagtttaagtgtttattgatgaatgaattattaaagaaaatgtggtgtgtgtttattatatatatataatggaatattagttagtagtattatttagaagaaggaaatattgttatttgtgttaatatggttgaatttggggaatattatgatatataaaataagtgaggtatagaaagatacgtaatatatgattttatttatatgtagaattttaaaaaataagtcgaatttagtaataaaggttagaatggtgattatttggggttgcggttgggggtaaaagagaaatattagttaaaggatataattttttagttataagatgagtaagttttggagatttaatatatagtttggtgattatagttaatatatgtttgaaatttgtaaagagagtagattttaagagttttaagcgtatatatatatatatatatataggaaattatgtgaggtaatgatatgttaattaatttgattgttgtaattattttataaagtatatatgtattaaaatattatattgtatattttaaaaataaaaatttttaatatggaaataaaagtgaaaaaaaaaaagagtgagagatagttgaaattttttagtgggaattttgttgaagattttagaagaggggtatttgtataaatattgaagaggatattaatgttttattaataatttagatatagaattatttaaaagatgttgtatgtgtagtaagtatgaaaagttatataaattatattaaattgaaataaagaaaagatattataaatattataattattattaattaagttttattcgtgtgttaggtattgtgtgtatattattttttttatttttaatagtttaataagatagatatttttatttttgttgtatatgtaagggaatagtaagagtatttggtttgaattaattatattttttaggttttttttgaggatttgaaatatagtttatttttttgttatgttaggtaagaggtttggttttttggatttaggtattgatttagaggaagatatgggtatgtttgtttgttttagggtta

SEQ ID NO: 161 - DNA, 5976 bp, Artificial Sequence
  chemically treated genomic DNA (Homo sapiens)
agaggggtattttttattttaatttgaattttatgattgtattttttgttaggagatgaaagggataagattgtttgaaggattaatttttagtttttaggtaggttagtggttaaaatatttaggaagtgaaagtttgttttttgttataaggaaatttggagtttgtgattttattatgcggggtttgttatttgttaggtgatagggttttttatttatttgcggtgatttgaagggtaaggtttttggttaaatattttttttttttagtgatgtttgaaattttattgttagcgttggattttagtaagattttagagaaagtttaatttttggagtttgggttttttttagttgagatgttaggaaagtaatgggttttattatttgtacggataggtttgtgtatagttttaggggatttagggattttattagagtttatttatagatattaggttaaaagttttggatagtatttataatttttttgaaagaagaaaagtttttttttagagttttttttaaagtgtaaatggttttgggaggttcgaaatgatgagttggtcggtatgaaagaattttttttagtagatgtaagagataatttgaggagttttagtggcgggggtgggggaaggagagtttgggggaggggaggttttaggtagtttataattttttttagaattggaaagggaatgtattgggttaagagggttaattatttatttttgtagagtgtttataagaattttatgaattaagtgttattaatatttttattttatagatgaggaaattaagatggtggagataaaatgatttatgttttttaattaatggtagagttagaagtgaatttaggttggagtgaagtggttttagtgtttaaatgatttttttattttagtttttagagtagttgggattataggtatgtattgttatgtttagttaatttaaaataatatttgttggggagatggggttttattatgttgtttagattggttttaaatttttgggtttaagtaatttttttattttttaattagttttttaaagtgttgcgattatagttgtgagttattaggtttgtttaggtatttttgtttgatataagagaaaatagagggtaggtatagtggtttatatttgtaattttagtattttgggaggttgaggtaggtggattatttgaggttaggagtttgagattagtttggttaatatggcgaaatttcgtttttattaaaatataaaaattagttagatatggtgacgtgtgtttgtaattatagttatttaggaggttgaggtataagaattttttgaatttgggaggtagagagtgtagtgagtcgagatcgcgttattgtattttagtcggggtaatagagtaagattttgttattaaataaataaataggaaatagagaagtaatttagtgtgttgcgaaagttatatagtatttgttttttataaggagtttttttgtgttttcgttttattttggatatttgatttattgtttttggagtttggagaaggatttgtcgagaagtttgaagaatgtattaggtttgatttgattttgttgtttttaattgttttttaaaattttttttattgaattattagagtgtaatggaagagtcgatgagagtcgttgtagagttacgaggttaaggtttgttgggtagaagaaagtaaagttttaaaggtttttagggtttagcgatggtataaaatatgtatttttatataattgagaggaaaaaaataagtagatagtatagttttatgggggaaacgtttttttttgtatttttattattttgtttaaggtacgattttagtgggaaaggaaatatcggagttttttttttttgagttttttggtgggttaagagtagagggagttaaaatacgatatttaaaagatttgattggaaatttattaaaattgaggggataggttgttggggggggcggtgttgggttgtttagaaatcgtttgtatttgagaaattatttgatggatttagaggtatttttagttttgggtgaaatattttaaatatggttttttttaggaggaagcgaaataggggttgggttttttgaaagagtaatttttattttaaatatttattgagtagttgttatgatgagttaagaattttgtttagcgattgtttttgtattagtttatgttaatttatttatataaaggagaatattgatttttttaaggttatagggttagtgagtggttgattttatttaatgttgtgtagttttaattatgtttgaaggataaagggaaaggaggtgtttttgtcggggtagataagttatttagacgtggttggttatagggagttagatagggaagttgtttaatttaatatttgtttgtttattttgtttttgttttttgatggaggacggcgggtgttggagggttattggtttaggatttgagatttttggtttttatttattttatttttgattttaaaattattttattggggatagaattttttggagaaggtgatggtggttatggtgtggttgtggtattaaaagttttattttgggggttagaagattttgggttttggtttttggttttgatattgatttgtttatgtgatattgaataagttatttgtaaattataggtttgggtgaattttaaaggttttttttaggttaatattaaaaaatagattgaaaattgtagttttagttggaagattgggattatatgagatgaagttgattgttagaagaaaggttttggaattagagaggttggttttagttttgcgttattttttattggttttaatttttttaagttttagttgtttatttattatatgggaataataatatagtttttgggttgttttgaaatgagtttaaatgagttggttagtggttgggtacggtggtttatgtttgtaattttagtattttgggaggttgaggtaggtggattatttgaggataggagtttaagattagtttggttaatatgatgaaattttgtttttattaaaaatataaaaattagttagtcgtggtggcgtatgtttgtaattttagttatttaggaggttgatagaggagaatcgtttgaatttaagaggcgaaggttgtagtgagttaagaatatattattgtattttagtttgggcgatagagtaggatttcgttttaaaaaaaaaagagttggttagtgttaaatgtttagtatagagattggtatagtaatttttaatgtttagtatttattgttattattttttttttttttttttttttgagatagagttttgttttgtcgtttaggttggagtatagtggcgcgatttcggtttattgtaagttttattttttaggtttatgttatttttttgttttagtttttcgagtagttgggattataggcgtttattattacgtttggttaattttttgtatttttagtagagacggggttttattgcgttagttaggatggttttaattttttgatttcgtgatttgttcgtttcggttttttaaagtgttgggattataggcgtgagttattatgtttggttttattgttattatttttattttttatttttgtatagagtatttatggtttaagaaatatttgttattttaattgtatgggagttttataatagtatagggagatatttttgattattatttttattaggagggtggagaaattgaggttttgggaggtggttttgatttagggaattaatttgttgatttattaatttatgaagttttatagttaaaaaagattagattaaaaaatgagaatttagtaaaggggttgaggtaggaggatcgtttgagtttagaaatttgagattagtttcggtaatatagtgagattttttttttagaaaaattttttaaaaaattaggtcgttcgaggtagagtgtagtggtttacgtttgtaatttaatattttaggaggttgaagagggtggattatttgaggttaggagttttagattagtttggttaatatggtgaaatttcgtttgtattaaaaatataaaattagtcggtgtggtggtatacgtttgtagttttagttatttaataggttgagataggagagttttttgaattcggtaggcggaggttgtagtgagtcgagatcgtgttattgtattttagtttgggtaagatagagcgagatttcgttttaaaaaatataaataaaataaataaataaaaaattaggttgttagtttagtggtttatggtttatatttgaaattttagtattttgggaggttaaggtaggaggatcgttttagtttaggagttcgagattaggttgggtaatatagggagatatagcgtttttattgtttttgttcgtttcgatttgtttttttataaaaaggtaaaagaaaaaaaaattagtttggcgtggtggtgtgtatttgtatttttagttattagagaggttggggttagaggatcgtttgagtttaggagttcgaggttgtagtgagttgtgatcgtattattgtattttagtttgggtgaaagagtgagattttatttttaaaacgaataaataaaaaattttaaaaaataaaagaatttagttaagtgtaaaagttttttttgattttaggttttagtgagttatcggcggggttgggattcgaatttagtggaattagaatcgtgtaggttttataatttatttagattttagtaattttaggttagagggttatcgcgtttatgcgaggtcgggtgggcgggtcgttagtttcgttttggggaggggttcgcgttgttgattggttgtggtcggtaggtgaatttttagttaattagcggtacggggggcggtgttttcggggtttatttggttgtagttacgtatttttttttagtggcgtcggaattgtaaagtatttgtgagtttgcggaagttagtttagattttagttcgttttagttcggttcgattcgatcgtattcggcgtttgttttcgttcggcgttttcggttagttatgggtttttggagtcgtagtttttcggcgttgttgttgttgttgtaggtatttcggattttttgatttgcgagggacgtattcgggtcgtaagtttcgcgttttagttttgcgtttttttttttttcgtcgttatcgtttttttttttttaagaaagttcgggttttgaggagcggagcggtttggaagtttcgcgcgtttcggattttttagtgatgggagtggggggtgggtggtgaggggcgagcgcggtttttttgttttttttagcgtagatcgaggcgggggcgtttggtcgcggagttcgcggggtgggttcgcgcgggcggtgggggcgtgaagcggggtgtagggggtggggtgtggagaaggggtgttttggtgtaagtcgagggggagttaggagtcgtggggacgattttcgagggaaggagaggggtattcgtagaaataaaggtatttgttatgttaagaaaggtcgtaaataggagtgagggtttcggggataagaaagtgaggtcggaggaggtgggagcgtttttcgttttgaggagtggtgtattttcggtttaaggaaagtggggtattggagaataaagatatttttaataaaatgagaaaggagattgaaagggaacggtgggttaggttttgagggggtgattcggcggttttttttcgggagtttttgggggttcggcggtcgtaggtttcggggtgggggagggtgacgtcgttgttcgttcgtttcggggttgcgggttggggtttttttttaatttcgacgtcgggagcgagggaggggcggcgttgttggtttcggtgagtaggagggaatttttcgagttattcggttttatttattttttttttattttagg

SEQ ID NO: 162 - DNA, 5976 bp, Artificial Sequence
  chemically treated genomic DNA (Homo sapiens)
tttggggtgggggaaaggtagatggaatcgggtgattcggagggtttttttttgtttatcgaaattaatagcgtcgtttttttttcgttttcggcgtcgggattgggggaggattttagttcgtagtttcgggacgggcgggtagcgacgttatttttttttatttcgaaatttacggtcgtcgagtttttaggaattttcgggagggggtcgtcgagttatttttttaagatttagtttatcgtttttttttagtttttttttttattttattggagatgtttttattttttagtattttattttttttagatcgggaatgtattattttttagagcgaggggcgtttttatttttttcgattttatttttttattttcgggatttttatttttatttacgattttttttggtatggtaggtgtttttatttttacggatgtttttttttttttttcgaagatcgtttttacgatttttggttttttttcgatttgtattagggtattttttttttatattttattttttatatttcgttttacgtttttatcgttcgcgcgagtttatttcgcggatttcgcggttagacgttttcgtttcggtttgcgttggagggggtaggaaagtcgcgttcgttttttattatttattttttatttttattattggggggttcggagcgcgcgaggtttttaggtcgtttcgttttttaggattcgaatttttttggaagaagggaagcggtgacgacgggagaggaaggggcgtagggttggggcgcggagtttgcggttcgaatgcgtttttcgtaagttaggggattcggggtatttgtagtagtagtagtagcgtcgagaggttgcggttttaagggtttatggttggtcggggacgtcgagcgagggtaggcgtcgggtgcggtcgggtcgggtcgggttggagcgggttggagtttgaattgattttcgtaagtttataggtgttttgtagtttcgacgttattgagagggggtgcgtggttgtagttaggtgagtttcggaggtatcgtttttcgtatcgttgattggttgagggtttatttgtcggttatagttaattagtagcgcggatttttttttagggcggagttgacggttcgtttattcggtttcgtatagacgcggtgattttttagtttggagttgttagggtttaggtgggttatgggatttgtacggttttgattttattgggttcgaattttagtttcgtcggtggtttattaagatttgggattagaaagggtttttatatttggttgagtttttttgttttttgggattttttgtttgttcgttttggagatggggttttatttttttatttaagttggagtgtagtggtgcgattatagtttattgtagtttcgaatttttgggtttaagcggttttttggttttagtttttttagtagttgggagtataggtgtatattattacgttaggttaattttttttttttttgtttttttgtagagagataagtcggggcggataggggtagtgggggcgttgtgtttttttgtattgtttagtttggtttcgaatttttgggttgaagcgatttttttgttttggttttttaaagtgttaggattttaggtgtgagttatgagttattgagttagtagtttaattttttgtttgtttgttttgtttgtattttttgagacggagtttcgttttgttttgtttaggttggagtgtagtggtacgatttcggtttattgtaattttcgtttgtcgggtttaagagatttttttgttttagtttattgagtagttgggattataggcgtgtgttattatatcggttaattttgtatttttagtatagacggggttttattatgttggttaggttggtttggaatttttgattttaggtgatttattttttttagttttttgaagtgttggattataggcgtgagttattgtattttgtttcgagcggtttaattttttaaaaaatttttttagagaggggattttattatgttgtcgaggttgattttaaatttttgaatttaggcgatttttttgttttagtttttttattgagtttttattttttaatttagttttttttaattgtagagttttatgggttagtgagttagtaaattgattttttaggttaggattattttttaaagttttagtttttttatttttttaatgggaataatgattagaaatgtttttttatgttgttgtgggatttttatataattaaaatgataaatgttttttgagttataaatgttttgtatagaagtgaggggtaaaaatagtaataatagggttaggtatggtggtttacgtttgtaattttagtattttgggaggtcgaggcgggtagattacgaggttaggagattgagattattttggttaacgtagtgaaatttcgtttttattaaaaatataaaaaattagttaggcgtggtggtgggcgtttgtagttttagttattcgggaggttgaggtaggagaatggtatgaatttgggaggtggagtttgtagtgagtcgagatcgcgttattgtattttagtttgggcgatagagtaagattttgttttaaaaaaaaaaaaaaaaaaaaaatagtaataataggtgttggatattgaagattattgtgttagtttttgtgttaagtatttgatattgattagtttttttttttttgagacggagttttgttttgtcgtttaggttggagtgtaatggtgtgtttttggtttattgtaattttcgttttttgggtttaagcggtttttttttattagttttttgagtagttgggattataggtatgcgttattacgattggttaatttttgtatttttagtagagatagggttttattatgttggttaggttggttttgaatttttgtttttagatgatttatttgttttagttttttaaagtgttgggattataggtatgagttatcgtgtttagttattgattagtttatttaagtttattttaaaataatttaagagttgtattattatttttatatgatagatgggtaattgaagtttagagagattgaggttaatgagaggtggcgtaggattggaattaatttttttgattttagggttttttttttaataattagttttattttatgtggttttagttttttagttggagttgtagtttttagtttgttttttgatgttgatttggaagagatttttagagtttatttaaatttatgatttgtaaataatttgtttaatgttatataggtaggttaatgttaaagttaaagattaaaatttaggattttttgatttttagagtggggtttttaatgttatagttatattatggttattattattttttttagagaattttgtttttagtgaaataattttaggattaaaaatagaatagataggggttaaaggttttaggttttgggttagtggttttttagtattcgtcgttttttattaaaagataaaaatagaatagataggtaaatgttaggttagataatttttttgtttgattttttgtggttagttacgtttgggtggtttgtttatttcgataagggtattttttttttttttattttttaagtatggttagaattatatagtattaagtggagttagttatttattagttttgtgattttggggaagttagtgtttttttttgtataagtgaattggtatgagttaatataaaaataatcgttaagtagagtttttggtttattatagtaattgtttaataaatatttggagtaggggttatttttttaaaaggtttagtttttatttcgtttttttttggggaaagttatgtttggaatattttatttagagttaaaggtgtttttgagtttattaagtaattttttaaatgtagacgatttttgggtagtttagtatcgttttttttaataatttgtttttttaattttaatgagtttttaattaggttttttggatgtcgtattttggttttttttgtttttaatttattaggaggtttagagggagaaggtttcggtatttttttttttattaggatcgtgttttgaataagataatggaaatatagaaagaggcgttttttttatggggttgtattgtttgtttatttttttttttttagttatgtaaaaatatatattttatattatcgttgggttttgggagtttttagggttttatttttttttatttagtaagttttggtttcgtaattttgtagcgatttttatcgatttttttattatattttgataatttaataaaaaggattttagaaaataattaggggtagtaaagttaggttaggtttgatgtattttttagatttttcggtaagtttttttttaagttttaaagatagtagattaggtgtttagggtgaggcgggaatatagaggggttttttgtggaagataggtgttgtgtgattttcgtaatatattgaattgtttttttgttttttatttatttatttagtgataaggttttgttttgttgtttcggttggagtgtaatggcgcgatttcggtttattgtattttttgttttttaggtttaagagatttttgtgttttagttttttgagtagttgtgattatagatatacgttattatgtttggttaatttttgtattttagtagagacgggatttcgttatgttggttaggttggttttaaatttttgattttaagtgatttatttattttagttttttaaagtgttgggattataggtgtgagttattgtgtttgttttttgtttttttttgtattaaatagggatatttaagtaggtttggtggtttataattgtaatcgtagtattttgggaggttagttgggaggtgagaagattatttgagtttaggagtttgagattagtttgggtaatatggtgaaattttatttttttaataaatattattttgaattagttggatatggtagtgtatgtttgtagttttagttattttggaggttgaggtaggaggattatttgagtattggagttattttattttagtttggatttatttttggttttgttattagttgagaagtataagttattttatttttattattttggtttttttatttgtaaaatgggaatgttgatagtatttaatttataaggtttttgtaaatattttgtaaaggtgagtgattagtttttttggtttaatatattttttttttagttttaggaaaaattgtgagttgtttggagtttttttttttttaggtttttttttttttattttcgttattaaagttttttaggttattttttgtatttattggagaaaatttttttatgtcggttagtttattatttcgaattttttagggttatttgtattttaaagagggttttagagaaagatttttttttttttaaaggagttgtaaatgttgtttagggtttttaatttggtgtttgtggatgggttttggtggggtttttgaattttttgagattgtatataaatttgttcgtgtaggtgataaggtttattgtttttttaatattttaattggggaaaatttaaattttaggagttgagttttttttgagattttgttgagatttagcgttaatagtggaattttaggtattattggggaaaagaaatgtttggttagaggttttgttttttagattatcgtagatagataagagattttgttatttggtagataatagatttcgtatgatgggattatagattttaggtttttttatggtagaggatagatttttattttttgggtgttttggttattggtttgtttggaggttaaagattaattttttaggtagttttgttttttttattttttggtaaggggtgtagttatagggtttagattggggtgggaggtgttttttt

SEQ ID NO: 163 - DNA, 2501 bp, Artificial Sequence
  chemically treated genomic DNA (Homo sapiens)
tagaagtttttttttagagtgtgtttgggtatatatttaagtgtatggttgtaaatttttttttttaaagtattgaatagtattagatatttagtaggtatttaagaaatattgaatgtcgtggtggtggtgagttagaagttataaaaaaaatttttttttaaaaataataataaaaagaattattttattgtgaagtttagtattataaaaatttaaataatttattataagtttttattaaaaaaaattttttttttaaagtaaatagatagataatgtttagtttatttgaaatgtttgaaagtagaggggttttaaggtagtgggagaaggtgtttgttttttgttggatatttgataattagttttttggatggtttggatgtataggagcgaaggtgtagatagtagtggggtttagagtggggttttgaggttgtgtcgtggtttttttggggtttagttataattttggtttgattttagggcgaggtaggttaagggggtttgttattgtgtttttttatttttatttgggtttttatttttatagtagaggagaaagaagtttgtttttttcgaggttagttgcgttagaggaagaagattgggtatgtttgggtagagatttttagattttgagtagtttgagatgttagtaattgtagttgttttaagtttgggttttgttttttagtgggatttttgtttagatgaataatttattttttgtaattttttaaaagtaaaattgtaaatgttttaggtatagaaaggaggtaaaggtgaagtttaggggaggttaggggtgtgaggtagatgggagcggatagatatattatttatttttgtgtttgttagaagaattagtagatatttttagaattgttttttatttatgttatttttataaattatttgtaaatgagggttatttggtatttttgttattttggagttatagaaataaaggatgataagtagagagtttcgggtaggaggtaaaagttttgtgttttaattatagttatttttttgttgtatgatttgagttaggttattagatttttttgagttttagtttttttagtagtgtatacgggttatgtggggagtatttaggagatagataatttattcgttaaatttttttttttttggttaataaagttgttgtaattatagggattttttttgtttaggtgagtgtagggtgtagggagattggtttaatgtttaatttttttgtttttttggagattaggttgtttttttttggtagtttttttaattttttttttttcggaagtatgtgataattaataattttgtatatttaagtttagtggattttaatttttttatttgtgaaataaacgggattgaaaaattattttggttttaagatgttttgttggggtgtttaggtgttttaggtgtttttgggagaggtgatttagtgagggattagtgggaatagaggtgatattgtggggtttttttggaaattgtagagaggtgtatcgtttttataatttatgaatttttatgtattaatgttatttttttgatttttttagttgtattgggtaaatttttgtttgttagagtgggttagcggtgagttagaaagggggtttattttaatagtgttgtgtttttttggagagtgttaatttattttttaagtaaaaaaagttagatttgtggtttatttcgtggggaaatgtgtttagcgtattaacgtaggcgagggattgggggaggagggaagtgtttttttgtagtacgcgaggtttcgggatcggttggtttgttggaattcggttaggtttagttggttcggcgttgggtagttaggagtttgggtttcggggagggcggtttcgggcggcgcggtgggtcgagcgcgggtttcgtttttttgaggcgggttcgggcggggcggttgtatattagggtcgcgttgagttgcgttagttgaggtgtgagtagttgtcgaagttagttttttgtggagtcggagttgggcgcggattcgtcgaggtatcgaggtatttagaggaggtgagagagcggcggtagataataggggatttcgggtcggcggtttagagtcgagttaagcgtgttcgcgtgtgtttttgcgtgttcgcgaggatgcgtgttcgcgggtgtgtgttgcgtttataggtgtttttgcggtaggtgaatgacgggcgtgggtcggtgcgcgttcggtttgcgtatacggtgtttttaagtgcgcgggtgacgagagtcgggatgtgtcggagatttcggggcggagagcgggattataagtataggaatttttggttacgtttttcgtttttggaaatttagttggggcgagggagggcgtggacgggatcgttttgggagttcgtttttggttgcggttggttttaggttttaggcgtagtttgttcgcggcgtggggatgaagttcgtgtttttggaggggtttaggaagg

SEQ ID NO: 164 - DNA, 2501 bp, Artificial Sequence
  chemically treated genomic DNA (Homo sapiens)
tttttttgggtttttttagggatacggattttatttttacgtcgcgagtaaattgcgtttggggtttggagttaatcgtagttaaaggcgagtttttagaacggtttcgtttacgttttttttcgttttagttgggtttttaggggcggggagcgtgattagggatttttgtatttgtaatttcgtttttcgtttcggggttttcggtatatttcgattttcgttattcgcgtatttagagatatcgtgtgcgtaagtcgagcgcgtatcgatttacgttcgttatttatttgtcgtagaaatatttgtgaacgtagtatatattcgcgaatacgtattttcgcggatacgtagggatatacgcgggtacgtttggttcggttttgggtcgtcggttcggggttttttgttgtttgtcgtcgtttttttattttttttgagtgtttcggtgtttcggcgaattcgcgtttagtttcggttttataaggaattgatttcggtagttgtttatattttagttggcgtagtttagcgcggttttgatatataatcgtttcgttcgggttcgttttaaggaggcgggattcgcgttcggtttatcgcgtcgttcgggatcgtttttttcggggtttaggtttttggttgtttagcgtcgagttagttgagtttggtcgagttttagtaggttagtcggtttcggaatttcgcgtgttgtaggagggtatttttttttttttttagtttttcgtttgcgttggtgcgttggatatatttttttacgaagtgagttataaatttggttttttttatttggagaatgagttggtattttttaggaggatatagtattgttagaatgagttttttttttggtttatcgttgatttattttggtaggtaaggatttatttaatgtagttgaaaagattaggaggatgatattaatatataaaaatttataaattataaaaacgatgtatttttttgtaatttttagaaaagttttataatattatttttatttttattgattttttattaggttattttttttagaagtatttggagtatttagatattttaataaagtattttgaggttagaatgattttttagtttcgtttattttatagatgaggaaattgaggtttattgaatttaagtatataaagttgttgattgttatatgttttcgggaaggagggaattggagagattattaaaaaagggtaatttgatttttagggaaatagaagaattggatattgaattaatttttttatattttatatttatttgaatagaagaaatttttgtggttgtagtagttttgttggttaggaaggggaggatttgacgagtgagttgtttgttttttgaatattttttatatagttcgtatatattgttggggaaattggggtttagagaagtttggtgatttaatttagattatgtagtaaagaaatgattatagttggaatataggatttttgttttttgttcggggttttttgtttgttattttttatttttgtggttttaaaatgataaaaatgttaaataatttttatttgtagatggtttatggagatgatataaataaaggataattttggaagtgtttattggtttttttgatagatatagaaatgagtgatgtgtttattcgtttttatttattttatatttttgattttttttggattttatttttgttttttttttgtgtttgaaatatttgtagttttgtttttaaaaaattgtagaggatggattgtttatttgaatagaaattttattaaaaaatagaatttaggtttggagtagttataattattgatattttaggttgtttagagtttggaaatttttgtttagatatgtttagttttttttttttaacgtagttgatttcggggaggataggttttttttttttttgttgtggggatgggagtttaggtaggggtgggaggatatagtagtagatttttttggtttgtttcgttttggagttaggttaggattgtggttaaattttagaaaggttacggtatagttttaggattttattttaagttttattgttgtttgtattttcgtttttatatatttaaattatttaaagggttggttgttaaatgtttagtagaggataggtatttttttttattgttttgaagtttttttgtttttaggtattttaaatagattagatattgtttgtttgtttattttggggagaaaattttttttaataaaggtttgtaatgaattatttaaatttttgtggtattgagttttataatgaaataattttttttgttgttgtttttgggaaagaattttttttataatttttagtttattattattacgatatttaatattttttaagtatttattaagtgtttagtattatttagtgttttaaaaaaaaaagtttgtaattatgtatttgaatgtgtatttagatatattttaagggaggatttttg

SEQ ID NO: 165 - DNA, 3486 bp, Artificial Sequence
  chemically treated genomic DNA (Homo sapiens)
aattaaagaggatgagattttttgtttgattttaggtgaatttttttttgttagttaggtaggaagttttgatttgaaaattagttttgggtattgttttttttattgttttttgggtattaatttttgttttttaattttagttgaattagtggatggtgatattataggtttaagatagttgtatttaaatattagtgattataggttatattaaggaaatatttgtaggtaatttagggtttgggaaggagttatttttagttatttgtaagatagtaggatttgtagattatagtataattaaatttagataaaattttgaattagtgagaattattaggaaggaaaggaatagaaaatgaattaatttgagtgttaggagatttgtatttagttttgatttcggtattaatcgaatgtatgtttttggataggaaatttttttgagtttcgatttttttcgtggtaaaaaggagagggttaaattatagggtttcgagggttttttttagttgttatattttggagcgtatgagatgaggtaggtatataaagtggataagatgtggttaagaaaataagttatatattaagtttatttgtagtataggtgtttaagaaaattttgttgttgtgtaatattagaacggaaggttggtttttagtaaaatgtattaattttggtttaaattaagatgatgggtatcgggtatgggggtggggaggtagttgaagatttattgagttttgttttagggtagttttgtttatcgttttattttattttttattacggtgtttaagtttatattgagagagaaatttttagttgtaaaagggagaagagaaacgttggaatattagtatcggacgttaggatatggttgtggtgttttaaaaattattttattatttggagtttgatttcgaggggagtatttttattttttagttttttgaaagtatttattagtatttgaatattgttttgagtttgttggagtagtgaaatttggtgagagagaagggtggaggaaggaaggagttgttgtatttggcggttggatttaggtagaggaaattgttataatttcgggaaagaatagaaaagtagaaagggacgagtttttatacgtagttaatgtttatggttttaattgtgtttgggaaggaagattttgggttaggggtgtattttcgttttttaaaattaaacgtgtttgagatagttataaagtttattaagggatttgagagattagagttttttgttttttttttttaattttgagttttttttttatttttattgagggagagtttgagtttatgataagtgtcgcgtttatttttggttaatttttaaaagaaagacgttcgttttggttttttttttaggtttttagtttttttagggatggtagaaatttttgggttaaggttgagcgaattattgtttattgtttttattagtttttagtaaaggtacgtcggcgggggggcgtttagtttttttagtaaacgtttcgcggtttttttcgtagattacgaggtgggggtcgttggggagggtcgagttgggggtagttcgttatttcggtttttagcgagttgtcggcgattttcgcggttttttggtttaggtttcggtttttcgggcgaggagcgggagggaggtcggggtttaggcgtcgcggcgaattcgttaacgtagcgtcgggtttcgaattttaggtttcgttttaggttttcggtcgtttggttagtttgtttgttttaattttaattttttcgaggttagttagagtaggtttgttggtagtagtatttttttagtagttacgcgattagttaatttttcggcggcgttcggggaggcggcgcgttcgggaacgaggggaggtggcggaatcgcgtcggggttattttaaggtcgcgttcgttagtttcggcggggcggttttcgtcgtcgtaattaatggatttttttttttgtttaaatagattcgtcgtgttaattattttttttttcgttagttttttttttatcgttatattgggttattaaaaaaagggggttcgttttttcggggtgttttttttttttttttttgttttcgtttgtttacggttttgcgatttcgacgtcggtaaggtttggagagcggttgggttcgcgggattcgcgggtttgtattcgtttagattcggacgggttttgttatttttttcgtttgtttggttttttttttttttcgttttttcgttcgttagtttatttgattagcggagattcggcggtcgggtcggggttttttcgtagtttttgcgcgtttttagagttcgggtcgtggttcgtcggggtttgtgttttttggtttcgagggtagtcgttgggttttcgagaggggttcgggttgcgtaggggcgttttgttttgttcggttttgtttttttgagagtgcgagagaggcggtcgtgtagattcgggagaaagatgttaaacgtgcgagtgtttaacgggagttttagtttggagcggatggacgttaggtaggcggagtattttaagttttcggtttgtaggaattttttcggttcggtggattacgaagagttaattcgggatttggagaagtattgtagagatatggaagaggcgagttagcgtaagtggaatttcgatttttagaattataaatttttagagggtaagtacgagtggtaagaggtggagaagggtagtttgttcgagttttattatagattttcgcggttttttaaaggtgtttgtaaggtgtcggcgtaggagagttaggatgttagcgggagtcgttcggcggcgtttttaattggggtttcggttaattttgaggatacgtatttggtggatttaaagattgattcgtcggatagttagacggggttagcggagtaatgcgtaggaataaggaagcgatttgtaatcgacggtaatgatttttttttaattatagaatgtgtttggggtttcgttttgtttgttggagggtgttaattttagtttgtttttcggcgtattttgatttagttttgggagagttaattttattggttttaggtgtttagtgttatttggtttattgtttgtttgtttgtgatttttaagttagaaattggagatggtaagattcgataatttttttaatttaatatatcgcggttttttttattagtaatttttaggtatgtgataaagttgggatgtttattaacggttcgttttttggttagggaaagagttttggggcggagaatgtattttttgttttttgaaaataattttattttgtgtttttaaaagttattggggatgacggatttaggattgtgggtggaggtagtgggttttttattttttgattatggggttaatttttgttagttattgttttttttaataaagattgtgtgttttttttaaaaattttttttgcgtttaga

SEQ ID NO: 166 - DNA, 3486 bp, Artificial Sequence
  chemically treated genomic DNA (Homo sapiens)
tttaagcgtaggggaaatttttaaaaagaatatataatttttattagaaaaaataatggttggtagaagttggttttatagttaggggatgaaaaatttattatttttatttataattttggattcgttatttttagtggtttttaagggtataaaatgaggttgtttttaaaaaatagaaagtgtatttttcgttttagagttttttttttagttaggaggcggatcgttgataaatattttaattttgttatatatttaggagttgttagtgagagggatcgcgatgtattaagttagggaaattatcggattttattatttttagtttttgatttaaaagttataaatagataagtagtgggttaggtagtattgaatatttaagattaataaagttagtttttttaaagttaaattagaatacgtcgaaaagtaagttaaggttaatattttttagtaggtaaagcggggttttaaatatattttatggttgggaaagggttattatcgtcggttgtaggtcgtttttttatttttgcgtattgtttcgttaatttcgtttggttgttcgacggattagtttttgggtttattaaatgcgtgtttttagagttagtcggagttttaattaaaggcgtcgtcgggcggttttcgttgatattttggtttttttgcgtcggtattttgtaggtatttttggggggtcgcgggggtttgtagtagaattcgggtaagttgtttttttttattttttgttattcgtatttgttttttaggggtttgtgattttgaaaatcgaaattttatttgcgttggttcgttttttttatgtttttgtagtgtttttttaagtttcgggttaatttttcgtggtttatcgggtcgaagaggtttttgtaggtcgagggtttggggtgtttcgtttgtttggcgtttattcgttttaggttagggttttcgttagatattcgtacgtttgatatttttttttcgggtttgtacgatcgtttttttcgtatttttaaaaaaataaaatcgaataaaataaagcgtttttacgtagttcgaatttttttcggaagtttagcgattgttttcggagttaaaagatatagatttcgacgagttacggttcgagttttaggagcgcgtaggggttgcggggaagtttcggttcggtcgtcgagttttcgttgattaaatggattggcgagcgggagggcggagaggagaggggattaggtaagcggagagggtggtaaagttcgttcgagtttgggcgggtgtaagttcgcgggtttcgcgaatttagtcgttttttaaattttgtcggcgtcggagtcgtagagtcgtgagtaagcggggataggggagggggagaaaaatatttcgaaaagacgagttttttttttttagtggtttaatatggcggtggaagggaggttgacgaagaagaaaatgattgatacggcgagtttatttaaatagaggaggagatttattggttgcggcggcgggagtcgtttcgtcgaggttggcgagcgcggttttaaggtggtttcggcgcggtttcgttattttttttcgttttcgagcgcgtcgttttttcgagcgtcgtcgggagattggttggtcgcgtgattgttggaggggtattgttgttaataaatttgttttggttggtttcggagaaattaaaattaagataaataaattagttaaacggtcgggaatttggggcggggtttgaggttcggggttcggcgttgcgttggcgggttcgtcgcggcgtttaagtttcgatttttttttcgtttttcgttcgggaagtcgggatttggattagaggatcgcgaaggtcgtcggtagttcgttaggagtcggggtggcgagttgtttttagttcggttttttttagcggtttttatttcgtggtttgcgggggaggtcgcggagcgtttgttgggggggttgggcgttttttcgtcggcgtgtttttgttgggggttggtggaggtagtgggtaatggttcgtttagttttaatttagaagtttttgttatttttggggaggttgggggtttagggaagaagttaaagcgaacgttttttttttagaaattagttaggagtagacgcggtatttattatgaatttaagtttttttttaatgaaaataagaaaggaatttaagattaaaaaaaaaaaataaaaaattttagttttttaagttttttaataaattttgtagttgttttagatacgtttagttttgaaaaacgagggtatatttttggtttaggatttttttttttaagtatagttaaggttatggatattggttgcgtgtgggaattcgtttttttttatttttttgttttttttcgggattgtagtagttttttttatttgagtttagtcgttaaatataatagtttttttttttttttattttttttttttattagattttattgttttaataaatttagaataatatttagatgttagtgaatgtttttagagggttgaagggtgaaaatatttttttcggggttaaattttagatgatgaaatgatttttaaaatattataattatgttttaacgttcgatattagtattttagcgtttttttttttttttttgtagttggaaattttttttttagtgtgggtttgagtatcgtggtggaaggtaaagtaggacgatgagtagggttgttttgagataaagtttagtggatttttaattgtttttttatttttatgttcggtatttattattttggtttgagttaaagttaatgtattttattggaaattaatttttcgttttaatattatatagtagtaaagtttttttaagtatttatgttatagatgagtttgatgtgtagtttgtttttttagttatattttgtttattttgtgtgtttattttattttatacgttttagaatgtgatagttggaagggattttcgggattttgtggtttaatttttttttttttattacggaggaaatcgagatttagagaggttttttgtttagggatatgtattcggttggtatcggagttaggattagatgtaagttttttaatatttaggttggtttattttttgttttttttttttttaatggtttttattggtttagggttttgtttgagtttgattgtgttgtagtttgtaggttttgttgttttataagtgattgaaaatggtttttttttaggttttgggttgtttgtagatgtttttttgatgtggtttgtggttattgatatttaaatgtagttgttttgagtttgtggtattattatttattagtttaattaaaattgaaggataggggttgatatttagagaatagtaaagggggtagtgtttagaattagtttttaagttaggattttttatttaattgatagaaaagaatttatttaggattaagtaagaggttttattttttttagtt

SEQ ID NO: 167 - DNA, 8666 bp, Artificial Sequence
  chemically treated genomic DNA (Homo sapiens)
ttgtagggttttttttagtttaaagaaagtaattaggtgtttttattgtgttatgatttttatttttagttgggttttttagtttggttttaaagaataaaataaaaggtttttttgtttgagttttatttaatttattttttttatttataagaggtattttaaatttttacgatttttaaattttttaatcgattattttatttttattttgtaaataagttaatttttttatttatagaaggaagtgttttaatttttttttcgttttgatttttttttttttttaaatttatgtattttttgtgataaaatttataattatcgttgtattttgagttttatttttttattatttttgagggattttaagtttttaaaaatattttattttgtttgtgtatttaattttttttttatttttttttaatttttttttttttttatttggtatttgtttttttaggtatatgtgtgtttaggttttttttattttttatttgttttattttatggtatagggttttgaattattataattaagttatgaaagagtagttaacgtagtgtttttatttttttgttattttattattttagttttttttttggttttttgaggagttttttataggttggtttttaggaataagtttaaatgaattatttttagtttttttaaatttttatgtttttgtatatttttttatttttgtttagaatattttttttttttttttttatttttaaatttttatattattttttaagattgggattagtttttagtattcggaagtttttgtttattagagataaatgagaatgagtttggttatttttttatttttttgtattattttgtgttttattttgtttttttaagagtattatatgttttatttaatttttaaataattgtttgaggtaagtatagttattattttaattatgtaaatgagaaaatagaggtttagatatgttgagtaattttgataaaagttaaagaattaataagtggaatagttgaggtttgaattttggtagtttgattgtagagatattatgtttgatttatttttttttgtttttattttatgtttgtttttagtttttgagtttgttgaatgaatgaataggtggtagtttttttttgttataagattgattagaattaagataggtttaaattttacgtgtagaatttttaaaattgtaaaggtagtgtaaatttaaaaaaagaatggtatttttaggaaagaggaaaagtaagtgtgagaataataataataataattaataaattttagtaaatttagtaaatgtagtaaatttttatattaaaagtttttggatatatattattatattttatggttatatgaaatatattataattttattttgtatataggaaatttgagattggtataaggagtatagagatttaggattttatatttttatttttttaggattttgtattttaggtcgatatgtatgagtaaattgggagtataatgggttttttaatagaaaaattaggaaagtttttttattattattaattatttatataatatttttttaattttattattatttatattttaagttttagagtatatgtgtataatgtgtaggtttgttatatatgtatatatgtgttatgttggtgtgttgtatttattaatttattatttagtattaggtatattttttaatgttatttttttttttttttttttatataagatttataatggataatggattttaatttttagagtaaaatggttttatttaaggatgttataatttttttagagttttattgtaagatatgagatatatatatttaaaatttgtttttggtatttttaaagtagttaatttttatatttgtttataatgtatttaaatgttgtttttatatggttgtattttttattttttttattaatagttatatatattttttataagagttgaaagagtttttgatgtaggaatttatggtagagttttagagaaatttttgaatttattgaaagttttatttagaaatatatgtgtaagtgaatatattttttttaaaaaaaattattatttatttttttttttgagaagaaggtatttattttaatagatttttgaaggagtttattttttttatttttttatttttattaagaattattgtaggtcgggtacgatggtttatgtttgtaattttagtattttgggaggttaaggtgggtggattatttgaggttaggagttcgagataagtttagttaatatagtgaaatttcgtttttattaataatataaaaattagttgggtatggtagtatgtgtttgtaattttagttattcgggaggttgaggtaggagaattgttcgaattcgggaggcggaggttgtagtgaatcgagagagatcgtgcggtgttattttattttagtttgggtaatagagcgaaattttattttaaaaaaatatataaaataaataaataaaaagaaagaattattgtattagtgatggaaatgtgtttttttttttttattttggtaattatttttttttttttttattataaaatattttaaattaaattaaaataattttatttatcgatagtttgaattttttttattattgttatatagttaattgagaggtatttcgaggaaaatataaatggtatagtaatgtattgtagattttaataatatatttgatattttaaattgtttttattggttttattttaaaaattatatgttttaaaattaagtagatattaaaagtataagatatattgggtttataaggtttaagttaattagggattgaaatataatttttaaatagagttggattatttagtaggtagattaagtatgtgtttaaggtattagtaaagtttgagtaatttattttttaaaacgtagtatatgtttttgataagtttaaaaagtagtagttataggaaaaattagaatttttatttttttgcgtttgttatattttttagtgttgtttaatttttttttgtaagtgagggtggtggagggtgtttataatttttttagggagtaagttttttttggttttttttttttttttttttttttttttttttgagattaagtttcgtttttgttttttaggttggagtgtaatggcgcgatttcggtttattgtaattttcgtttttttttgggtttaagcgatttttttatattagttttcgagtagttgggattataggtatgcgttattaagtttcgttaattttgtattttttagtagagatagggtttcgttatgttggttaggtttgtttcgaatttttggttttaggtgattcgtttgtttcggttttttagaatgttgggattatagacgtgagttatcgtattcggattttttttttatgtaatagtgataattttatttaaagtatttttttttttttttgagtcggagttttattttgttatttaggttggagggtggtggcgcgatttcggtttattgtaatttttgtttttcgggtttaagcgatttttttgttttagttttttgagtagttggaattatatacgtgcgttattatggttagttaatttttgtatttttagtagagacggggtgttattattttggttaagttggtttcgaatttttgattttaggtgatttgttcgtttcggttttttaaagtgttgggattataggtgtgagttatcgcgttttgttttaaagtattttttttttatgttttaaaataagattgtaagttagtttttaaagcggataatttaagagttaataggtattagtttaggatgtgtggtattgtttttaaggtttatatgtattaatatattatttaaatttataataatttttataaagtagggggtatttatatttttttttttttttataattacgaaaaatgtaaggtatttttagtaggaaagagaaatgtgagaagtgtgaaggagataggatagtatttgaagttggtttttggattattgtgtaattttgtttttagaatattgagtattttttttggtttaggaattatgattttgagaatggagttcgtttttttaatgattttttttttatttttttatttgtttataggtagaattttttttcgttcgtattaaataaattttatttttttagagtttgtttttatattaggtaatgtatacgtttgagaaatttttgttttagatagtcgttttatacgtaggaggggaaggggaggggaaggagagagtagttcgattttttaaaaggaattttttgaattagggtttttgatttagtgaatttcgcgtttttgaaaattaagggttgagggggtagggggatattttttagtcgtataggtgatttcgattttcggtggggtttttataattaggaaagaatagttttgtttttttttatgattaaaagaagaagttatattttttttatgatattaaatatttcgatttaatttggtagttaggaaggttgtatcgcggaggaaggaaacggggcgggggcggatttttttttaatagagtgaacgtatttaaatacgtttttgttggtaggcgggggagcgcggttgggagtagggaggtcggagggcggtgtggggggtaggtggggaggagtttagttttttttttttgttaacgttggttttggcgagggttgttttcggttggtgttttcgggggagatttaatttggggcgattttaggggtgttatattcgttaagtgttcggagttaatagtatttttttcgagtattcgtttacggcgtttttttgtttggaaagatatcgcggtttttttagaggatttgagggatagggtcggagggggttttttcgttagtatcggaggaagaaagaggaggggttggttggttattagagggtggggcggatcgcgtgcgttcggcggttgcggagagggggagagtaggtagcgggcggcggggagtagtatggagtcggcggcggggagtagtatggagttttcggttgattggttggttacggtcgcggttcggggtcgggtagaggaggtgcgggcgttgttggaggcgggggcgttgtttaacgtatcgaatagttacggtcggaggtcgatttaggtgggtagagggtttgtagcgggagtaggggatggcgggcgattttggaggacgaagtttgtaggggaattggaattaggtagcgtttcgatttttcggaaaaaggggaggttttttggggagtttttagaaggggtttgtaattatagatttttttttggcgacgttttgggggtttgggaagttaaggaagaggaatgaggagttacgcgcgtatagatttttcgaatgttgagaagatttgaaggggggaatatatttgtattagatggaagtatgttttttattagatataaaatttacgaacgtttgggataaaaagggagttttaaagaaatgtaagatgtgttgggattatttagtttttaatttatagatatttggatggagtttattttttttattaggagggattattagtggaaatttgtggtgtatgttggaataaatatcgaatataaattttgatcgaaattatttagaagcggtcgggcgcggtgttttacgttttgtaatttttttattttgggagattaaggcggggggaattatttgaggtcgggagttcgagattagtttggttaataggtgaaatttcgtttttattaaaaatataaaaagtagtcgggggtggtggtaggcgtttgtaattttagttattcgggaggttgaggtaggagaatcgtttgaattcgggaggttgaggttgtagtgaatagcgagatggagttattttattttagtttgggtgatagagtgagattttgtcgaaagaaagaaagagagaaagagagagagaaaaattatttagaagtaattatatattgtgtttatttttaattgagtagggtaaataaatatatgtttgttgtaggaatttaggaaataatgagttatatttatgtgattattttagaggtaatatgtagttattattttgggaatatttgttaatatttttgtttttttattatttttagtttatttgatatagtttatttgtgataagagtttttaattttttatttttgaatagaggtgttttttttttttttatttttgttttgtgagggagttaggggaggatttaaaagtaattaatatatgggtaatttagtatttttaaaattttgttaatagtttgaattcgggagtttggttttgtagttttataatattttagaagagattttatttgtttaaaaataaaaaggaaaaagaaaagtggatagttttgataatttttaatggagaagggagaagaatatgtagaaaaggggaaatgatgttggtttagaattttaattatattggtgtttaatataggaatatttatttatataatattttaaagtattaaatttatattagtatattattaaatggatatattattaaatgggtttaagtattttatatattttaatttaattgatttattttttttttgttttggatttttattatgatttaaatatttatatatgggttattttttagattttttatattatgaaatataagaaaaatttttaaggttagttttatgattaagacgaaggattttattgaatatataaaataataaatatattgtaatattttgtttttttttttgtagttgtaatttggtttgtttatattttttttttgtttttttgaaaattgagttagttttatttttttaggataggatttaataattataatataatttagtataattttttgatttaggtaaattatgtaatttgtgtttagtatgaaatgtatttaaaaataagtaatttttttttaatattattatttttaaattaatataataaataatagttattttaaaataaattgtttatttttattatgtagtatttaaattttaaggttgttatgattgtagatagtattttaaaatttttttttggaaatggttttgtttttaagatgatttaggaattaaagaggtgattattttttgtttaatgaatttttaaattataaatttgggaagtgttttagttttttattgttgttgttataaattattataaatgtgttagttaaaataaatataaaattattattttatagttttagagattagaagttaaaaatgggtttataaggttttattttttttggaaattttaaggggtaatttgtttttttgttttttttagtttttagtgattattaaattttttggtttatggtttttgtattttttttgtggtttgtgtttttatttttgtattttttttttgattgtgattttttaataaaaatatttggggttatgttgggtttattttgaaaattttggataattttttttaagattattaattaaattatatttgtaaagttttttttgttatataagttaatgtattaaaagtttttgaggattaggatatagatattgggggtgggggggtattatttagtttattataggaaggaattttagggttaattaaattagtttttttattttatatttgaagaaattgaagttttggaattggagagtattatgttaaatgaaataagttaaatatagaaagataaatattatatgtttttatttatttgtgaaatataaaataattatatttttagtagtaaagagtagaatggtggttattagagttggggggtgggaggaatggggagatggtaattaagatataaagttttagttaagatgggaggaataagtttgattgttttttttgagatgtgttttatagtatgatgaatatagttaaatagtaaattttaaatgtttttatttgataaaaatgttaaatatttgagatgatggataggttatttagtttgatttaataattttttattgtgtttaaagattataattttatattgtattatataaatatatataattgtattattttaatatataattttaaaattaatataatgaaaaagaaattgaagtttaatatttttagaagttaagtgtaatttaaaagttttgtgagaatttgttttaataaataaataagttttttttttttaataattattatattttgcgtttggatatatagtagtgaataaaaaaaaaaaaaaaaaaaaaaatttttaggtttaatataattttaggaagaaattttagtagttgtattttaggggaaatataggaagttagtttggagtaaaagttagtttgtttttgtttttttgttattttgttcgtgttttatagtgttttttgtttgtgacgatagtttcgtagaagttcggaggatataatggaatttattgtgtattgaagaatggatagagaatttaagaaggaaattggaaattggaagtaaatgtaggggtaattagatatttggggtttgtgtgggggtttgtttggcggtgagggggttttatataagtttttttttcgttatgtcggtttttattttggttttgattattttgttttttttggtagg

SEQ ID NO: 168 - DNA, 8666 bp, Artificial Sequence
  chemically treated genomic DNA (Homo sapiens)
tttgttagagagaatagaatggttagagttagggtgggggtcggtatgacggaaaggaagtttgtgtagagtttttttatcgttaagtagatttttatataagttttaggtgtttaattatttttatatttgtttttagtttttaattttttttttgagttttttatttattttttagtatataatgaattttattatatttttcgaatttttgcggagttgtcgttataggtagagagtattgtgaggtacgggtaaaatagtaaaggggtagggatagattgatttttattttaggttaattttttgtattttttttgagatataattattgaaatttttttttgaaattatgttaggtttggagatttttttttttttttttttttttgtttattgttgtatatttaagcgtagaatgtggtaattgttaaaaagagaaaatttgtttgtttgttaaaataaatttttataaaatttttaagttatatttagtttttgggaatgttgaattttaattttttttttattatattagttttaaaattatatattgggatagtatagttgtatatatttatgtggtataatatgaagttatgatttttgaatataatggggaattattaagttaagttaagtaatttatttattattttaaatatttgatatttttgttaaatgagagtatttgggatttattatttagttatatttattatgttatgaaatatattttaaaaaaaataattaaatttattttttttattttaattgaggttttatattttgattattatttttttattttttttattttttagttttagtaattattattttattttttattgttaagaatgtaattgttttatattttatagataagtgagaatatgtgatatttgtttttttgtgtttggtttattttatttagtataatgttttttaattttaaaattttaatttttttaagtataaaataagaaggttagtttaattaattttaaaatttttttttgtggtaggttgaataatgtttttttatttttaatgtttatgttttaatttttaaaaatttttaatatattaatttatgtggtaaaagaggttttgtagatgtgatttaattaatggttttgagggagattatttagaatttttagggtgggtttaatataattttaagtgtttttattagagggttatagttagagagaagatataagaatggaagtataggttatagagaaaatatagagattatgagttaaggaatttgatggttattagaagttggaaaagataaggaaatagattgttttttagagtttttaaaaggaatgaaattttgtggatttatttttgatttttgatttttagaattgtaaaataataattttgtgtttgttttagttaatatatttgtgataatttgtaatagtagtagtaggaaattaaaatattttttaggtttatgatttgagagtttattaaataagagatggttatttttttggtttttaaattattttggaaataaagttatttttagagaggaattttaaaatattgtttgtagttatagtaattttaaaatttgagtgttgtatggtggaagtagataatttattttaggataattgttatttgttatattagtttgaggatggtggtgttaaagaggagttatttatttttaggtatattttatattaaatataaattgtataatttgtttaaattaaggaattatattaaattatattatggttattaaattttgttttgagaaagtgaaattgatttagtttttaaagagataaagagaaagtataagtaaattaaattgtagttataaaaagaaagataaaatgttgtagtatatttattgttttgtgtatttaatgaagtttttcgttttggttataaaattagttttaaaggttttttttatattttatagtatgaaaaatttaaaaagtaatttatatgtaaatatttaaattatgatagaaatttaaagtaaaaagaaaatgaattaattgaattaaaatgtgtaggatgtttaaatttatttgataatatatttatttgataatatattaatatgaatttagtattttaaaatgttatataaataaatgtttttatattaaatattaatgtagttaggattttaagttaatattatttttttttttttatatgttttttttttttttttattaaaaattgttaaaattatttattttttttttttttttttgtttttaaataaataaggttttttttaagatattgtaggattataaagttaaattttcgggtttaagttgttggtaaaattttagagatgttaagttatttatgtattaattatttttaaatttttttttaatttttttataaaataggagtagggagaggagaaatatttttgtttaaaaatgaggaattgaaaatttttattataaataaattatattaagtaagttaaagatagtaaaagagtaaaaatgttagtagatatttttaaaatggtaattatatattatttttggaatgattatatgaatgtggtttattattttttaagtttttatagtaaatatatatttatttgttttatttagttaaaaataaatataatatgtagttgtttttgaataatttttttttttttttttttttttttttttttttcgataaagttttattttgttatttaggttggagtgaagtggttttatttcgttgtttattataattttagtttttcgggtttaagcgatttttttgttttaatttttcgagtagttgggattataggcgtttgttattattttcggttattttttgtatttttagtagaggcgaggttttatttgttggttaggttggtttcgaattttcgattttaggtgatttttttcgttttgattttttaaagtgaagggattataaggcgtgaggtatcgcgttcggtcgtttttgaataatttcgattaaaatttatattcgatatttattttaatatatattatagatttttattgataattttttttagtaagaaagataagttttatttaggtatttgtgaattggaggttaagtagttttagtatattttatatttttttaagattttttttttattttaaacgttcgtaaattttgtatttgataaagagtatatttttatttaatataaatatgtttttttttttagatttttttagtattcgagagatttgtacgcgcgtggttttttattttttttttttggttttttaagtttttagggcgtcgttaggaggaggtttgtgattataaattttttttgaaaattttttaggaagtttttttttttttcggagaatcgaagcgttatttgattttaatttttttgtaaatttcgttttttagagtcgttcgttattttttgttttcgttgtagattttttatttatttggatcggttttcgatcgtaattattcggtgcgttgggtagcgttttcgtttttagtagcgttcgtattttttttattcgatttcgggtcgcggtcgtggttagttagttagtcgaaggttttatgttgtttttcgtcgtcggttttatgttgtttttcgtcgttcgttgtttgtttttttttttttcgtagtcgtcgagcgtacgcggttcgttttattttttggtgattagttagtttttttttttttttttttcggtgttggcggaagagtttttttcgattttgttttttaaattttttggagggatcgcggtatttttttaggtaaggggacgtcgtgagcgagtgttcggaggaggtgttattaatttcgagtatttagcgaatgtggtatttttgaagtcgttttaggttgggtttttttcgggggtattagtcggaagtagttttcgttagagttagcgttggtaaggaaggaggattgggtttttttttatttgttttttatatcgtttttcggtttttttgtttttagtcgcgttttttcgtttgttagtaaaggcgtgtttgagtgcgtttattttgttaaaaagaaattcgttttcgtttcgtttttttttttcgcgatataatttttttaattgttaaattgaatcggggtgtttggtgttatagggaaagtatggtttttttttttaattataagaaaaagtaaaattatttttttttagttgtgagagttttatcgagaatcgaaattatttgtacgattagaaagtgtttttttatttttttaatttttgatttttaggagcgcggggtttattaagttagaaattttagtttaaaggattttttttggagagtcggattgtttttttttttttttttttttttttttttgcgtgtaaaacggttgtttggggtaagggttttttagacgtgtatattgtttggtataagagtagattttgaaaagatgaggtttatttaatacggacgggggagaattttgtttgtaggtagataggaaaatggggagggagttattggaaggacggattttatttttaaagttataatttttagattagaaaaagtgtttagtgttttagaagtagagttgtatagtgatttaaagattagttttaaatattgttttgttttttttatattttttatattttttttttttattgaaaatattttgtatttttcgtaattataaagggggaagggaatatgagtgttttttgttttataggggttgttgtgagtttaaatgatgtattaatatatataagttttaagaatagtgttatatattttaagttaatatttgttagtttttgaattattcgttttgaggattggtttgtaattttgttttgaggtatagaaagaaaatgttttggagtaggacgcggtggtttatatttgtaattttagtattttgggaagtcgaggcgggtagattatttgaggttaggagttcgaggttagtttggttaaaatggtgatatttcgtttttattaaaaatataaaaattagttggttatggtggcgtacgtgtgtaattttagttatttaggaggttgaggtaggagaatcgtttgaattcgggaggtagaggttgtagtaagtcgagatcgcgttattattttttagtttgggtgatagaatgagatttcgatttaaaaaaaaaaaaaaatgttttggatagaattattattattatataaaaggaaagttcggatgcggtggtttacgtttataattttagtattttgggaggtcgagataggcggattatttgaggttaggagttcgagataagtttgattaatatggcgaaattttgtttttattaaaaaatataaaattagcggggtttggtggcgtatgtttgtaattttagttattcggaggttgatgtaggagaatcgtttgaatttaggagaaggcggaggttgtagtgagtcgagatcgcgttattgtattttagtttgggagataagagcgaaatttggttttaagaaaaaaagaaagaaagaaagaaagaaagattaagaagaatttattttttgaaaagattatgggtattttttattatttttatttataaagaaaagttaaatagtattaaagagtataataagcgtaaggaggtaaaagttttaattttttttgtgattattattttttaagtttattaaaaatatgtattacgttttaaaaaatggattgtttagattttgttgatgttttaagtatatgtttaatttgtttattggataatttagttttgtttaaaagttatattttaatttttggttgatttaaattttgtagatttagtatattttgtatttttagtgtttgtttgattttaaaatatgtagtttttaaaatgaagttaatgaaaataatttgggatgttaagtatgttattaaaatttataatgtattattgtattatttatatttttttcggggtattttttaattagttgtgtagtaatgatagggaaaatttaaattatcgataaataaaattattttagtttagtttaagatattttatgatggaggaggaagaaagtggttgttaggatgggagggagggaatatatttttattattaatataatggttttttttttttgtttgtttgttttgtgtgtttttttgagatggagtttcgttttgttgtttaggttggagtgaaatggtatcgtacgatttttttcggtttattgtaattttcgtttttcgggttcgagtaatttttttgttttagtttttcgagtagttgggattataggtatatgttgttatatttagttaatttttgtattattagtagagacggggttttattatgttggttaggtttgtttcgaatttttgattttaggtgatttatttattttagttttttaaagtgttgggattataggtatgagttatcgtgttcggtttatagtggtttttaatgggggtgggagagtgggaagagtaggtttttttaagagtttgttgaaataaatattttttttttaaaaaagaaagtaggtaatgattttttttaaaaaagatgtgtttatttgtatatgtatttttagataaaatttttagtgaatttagggatttttttgaaattttattatggatttttatattaagaatttttttagtttttgtgaaaaatatatatagttattggtgaagaagatgggagatgtaattatataaaaataatatttggatgtattataaataggtgtaaaagttgattgttttggaaatattaagaataagttttagatatgtatattttatattttgtagtagagttttggaaggattatggtatttttgggtggggttattttgttttagaaattgaagtttattatttattataaattttatgtaggggggaggggggagggatagtattaggagatatatttaatgttaaatgatgagttgatgggtgtagtatattaatatggtatatgtatatatatgtaataaatttgtatattgtgtatatgtattttaaaatttaaagtataaataataataaaattaaaaaaatattatgtaaataattaataatagtgggaaaatttttttagtttttttgttaaagagtttattatatttttagtttatttatatatatcgatttgaggtgtaaaattttagaagaatgaaaatataaagttttggatttttgtgttttttatgttagttttagattttttatgtgtaaaatgggattataatatattttatgtggttataaaatatgataatgtatgtttaaaagtttttaatgtaaaaatttattatatttattaaatttattaaagtttgttggttattgttattattatttttatatttatttttttttttttttgagaatgttattttttttttagatttgtattgtttttgtagttttgaaaattttatacgtgaaatttaaatttgttttaattttgattagttttataataaaaaaagattattatttgtttatttatttaataagtttagaaattaagggtagatatggggtgggggtagaggggagtaggttaaatatagtatttttatagttagattgttagggtttaaattttaattgttttatttattggttttttaatttttattaaagttatttaatatgtttgggtttttgtttttttatttgtatgattaggataataattgtatttgttttaaatagttgtttagggattaaatgaagtatgtaatgtttttagaagagtaaaataaagtatagaatgatataagaaaatgaaaaggtgattaaatttatttttatttgtttttagtaggtaaaggttttcggatgttgagagttgattttagttttgaagaatgatgtgagagtttaaagatggaaaagaaggagaaagatattttaggtagaggtaagaggatgtgtaaaggtatagaagtttaggaaaattgaaagtaatttatttagatttatttttgaaaattagtttgtgaaggattttttagagagttaaaagaaaaattaggataatgggatggtaaggaagtggggatattgcgttgattatttttttatagtttggttgtgatagtttaaggttttatgttatgaagtgaggtagatggaaggtggaggagatttgagtatatatatatttggaagggtaagtgttaagtgaagagaagggaaagttagaaaagaataaaagaaaagttaagtatataggtaagataggatatttttgaggatttgaggttttttaaaaataatgaagaaatagaatttaaagtatagcggtggttatagattttgttataagagatatatagatttgggagggagaaaaggttagaacggggaggaagttgaggtatttttttttatgaatgaggaggttagtttgtttgtagagtgaaaataagatggtcggttaggaagtttgagaatcgtaaaggtttggaatattttttatgagtagagaggatgggttgagtaagatttagatagagaagttttttgttttgttttttaaaattagattggagaatttagttgagggtggagattatgatatagtagggatatttgattattttttttaaattaaagaaagttttgtag

SEQ ID NO: 169 - DNA, 2501 bp, Artificial Sequence
  chemically treated genomic DNA (Homo sapiens)
gaaaattaggttgagtaggttggttttttaaagaaatttattgagtttttataatgttttttttatttgacgggagaaaaggggttttggaagattaagtgtgaagttttagaattttgtttggagttggttaggattatttaggtttgagtataagtaaagcgttgttcgtggtgttagtaagcgcgaatgttttcggtaacgttttttttatttaaagttgttttttatttagttaatttgtttcgcgaagtttatatatttgtttcgtgtaagatttttagttattttatttagttattggttttttttttattattattttttatgttttttttaaagaaaaatattattttttatttttttattaattttaaatagtttttatttttttgatatatttattatttaagaaaatggtttaagaattgggttagattattttgttttaatttttttgataagttttagagaaatttaaaggttaaaataagagtataagagtaaaaggtagagaaattaagaaattgaagattaggaaatgggggttggatgggaaagaaaaagaaattgttattaatgttattcggtttttttttttgtttaggtggattttagttttgttgaggttttgttagtagatttttagttttaattagtatttttatggtggtggtatttttattgtttttaaaagaaagagttttttttaattttatagggatttgggggatgaggagttagagttaaggtattttaaaaaaaatatgtgaagatttttattttgtaatatataagtaattgtttttttgttaagattttgttttttttagtatttcgaattaaaatgattttgtaaataaaaattgtttatttttaggagaggtttatttatgtagttttttattaaagtttttaggtaataaatttataatttgcggttttttttttatttaatgtagtattcgttgaaatgttttaaatattttaagtaataaatgttgatttaaatttatttaggaagattaggaaggggaaaaaaagtatttggtatttaaatttttagaagagaatttaatgataggtttagtttgtttaatgataagtttagtattatattttttttttatgatgttttattattattgtataaattttttttattatttatgataaataaaaataagatatttgataaagtgggtttaaataggtaagagtgtaaataaagatttattgtataaatatgatgaaattgggattttagatttttaaagtataatttttttttgttttatgtgtgttaggttgttatttttaatttcgaattagttttttttttttttaagggttgtatttataatgtaaaaatggaaagaattaaaaagtatacgtaaaatatgattttcgggatttttttttatttttatggttgattaatttaaatagaaagatatatttaagagaaaattgttaagtttgatataagttatgaaatttgtgaagtttaagtattgtttggggatgaatttaatttgtatgataggtgtagagttgtcgtttttagatattttaagaaatacggagttattttgaatgattttttttcggttataagggagttattaacgtttttatagtgaaattaattggttggttgaaggaatagaaattttttgtttcgtttattggggattaggagttgagggtagtggtgaatatttttaaaatattagttttggttttattggatatttagcgagtagtgtagttagtatttttggcggttttttggtttagtttttggcgtatgcgttttagtatttttgggtaggttttttcgttttcgtgacgcgtcggttcgggtttggtttttcggcgattatagcggatagggggcggagtttaagggggtggggagacgtcggttttttggtttagttgaaaacggaattttttgtcggttggttttttattttgttagagcgaggcggggtagtgaggatttcgcgacgcgttcgtattttgcggttagagcggttttgagttcggttgcgttcgcgttaggcgtttttttttagaagtaatttaggcgcgttcgttggtttttgagcgttaggaaaagttcggagttaacgatcggtcgttcggttattgtacggggttttaagtcgtagaaggacgacgggagggtaatgaagttgagtttaggttttttaggaaggagagagtgcgtcggagtagcgtgggaaagaagggaagagtgtcgttaagtttacggttaacggtggattattcgggtcgttgcgcgtttgggggttgcggaatgcgcgaggagaataagggtatgtttagtgggggcggtagcgatgagggtttggttagcgtcgcggcgcggggattagtggagaaggtgcgatagtttttggaagtcggcgcggattttaacggagttaatcgtttcgggaggcgcgcgatttaggtagttggggttttagggt

SEQ ID NO: 170 - DNA, 2501 bp, Artificial Sequence
  chemically treated genomic DNA (Homo sapiens)
gttttggggttttagttatttggatcgcgcgtttttcgaaacggttgatttcgttgggattcgcgtcggtttttaggagttgtcgtattttttttattagttttcgcgtcgcggcgttggttagatttttatcgttgtcgtttttattgggtatgtttttgtttttttcgcgtatttcgtagtttttagacgcgtagcggttcggataatttatcgttggtcgtaaatttaacgatatttttttttttttttttacgttgtttcggcgtatttttttttttttaggagatttgggtttagttttattattttttcgtcgtttttttgcggtttggggtttcgtgtagtggtcgagcggtcggtcgttagtttcgggttttttttggcgtttaagaattagcgggcgcgtttggattgtttttgggaaaaagcgtttagcgcggacgtagtcgagtttaaagtcgttttggtcgtagggtgcggacgcgtcgcggagtttttattgtttcgtttcgttttggtagagtggggagttagtcggtaaagaatttcgtttttagttgggttaaggggtcggcgtttttttatttttttaggtttcgttttttgttcgttgtgatcgtcgggaggttaggttcgggtcgacgcgttacgagggcggggaagtttgtttaaagatgttaggacgtatgcgttagagattgggttagggagtcgttaggaatgttggttgtattgttcgttggatgtttagtaaagttaaggttaatattttgggaatgtttattattgtttttagtttttaatttttagtaggcggagtagaggatttttgtttttttagttagttagttggttttattgtggagacgttggtggtttttttgtgatcgagagaaagttatttaaaataatttcgtgttttttaagatgtttgaaagcgatagttttgtatttgttatataagttaaatttatttttaggtagtatttgggttttataagttttataatttgtattaaatttagtaatttttttttggatgtgtttttttgtttgaattagttaattataaaaatagagaaaaatttcgagaattatgttttgcgtgtgttttttaattttttttatttttgtattatggatataatttttaaaagagaaaaaaattagttcgagattgagagtggtaatttggtatatataagataaaaaaaaattatattttaagaatttgagattttagttttattatatttgtatagtaaatttttgtttgtatttttatttatttaaatttattttgttaggtattttatttttatttattatgagtaataaaggaaatttatgtagtaataatgaaatattataagagaggggtgtggtgttgggtttgttattaaataggttgaatttgttattaaatttttttttgaagatttaaatgttaagtgtttttttttttttttttaatttttttaggtgagtttgaattaatatttattatttaaaatatttaaaatattttagcggatgttatattggataggaagagaatcgtaagttatggatttgttgtttaaaaattttggtgaggaattgtataagtggattttttttaaaagtgaatagtttttgtttatagaattattttggttcggagtgttgaggaagataaagttttaataggagggtaattgtttgtgtattgtaaaatgagagtttttatatgttttttttaggatattttagttttgattttttattttttaaatttttgtagaattaaaaaaagtttttttttttaaaggtagtggaagtgttattattatggaagtgttggttagggttgaaaatttattgatagagttttaatagagttgaaatttatttggatagggaagggaatcgggtagtattaataataattttttttttttttttatttaatttttattttttagtttttagttttttaatttttttattttttatttttatgtttttgttttgatttttgagtttttttgaaatttattagaaaagttaggataagatagtttgatttaatttttgagttatttttttaggtagtaaatatgttagaaaaatgaaagttgtttggagttgataaggaaatggaagataatgtttttttttgagggggatataaagaatggtgatagggaaagaattaatgattaagtaaaatgattgagaattttgtacgaggtagatgtgtgagtttcgcgaagtaagttgattgaatgaaaaataattttgggtagggaaaacgttgtcgggggtattcgcgtttattagtattacggatagcgttttgtttatatttaggtttgggtggttttaattagttttagatagaattttaaagttttatatttgattttttaaagttttttttttttcgttaaatagaaaggatattatggaagtttaatgaatttttttgaaaaattaatttgtttaatttggttttt

SEQ ID NO: 171 - DNA, 2501 bp, Artificial Sequence
  chemically treated genomic DNA (Homo sapiens)
gtgttttagtttttgaatttatgttgttcgttattatattgtattgtttgtggatgatttatttgtttttgtagttttatttgaagaatttttttttttttttttttgaggtttgttttaaatattattttttttgtgaagattgtttggtgttttttaggagagagtgtgatttttttttttaggaatggtagtattttaaatatatatattttgtagtatattttattttgtatggtaatggtttgtttgtgagttttatttcgtattagagggtgagggttttgaagatagcgttaggttttatttatttcgatattttataatatttattatatgtttgatgaatgaatgtatagggggatggttgggtgtattttttttaattttttaattttttgaaataaataataaaattttatttttttttagaagttttggtatggttttttttattttgttatagttattgataattatttttattttttgtgtaatttattaggtaagaagtttatgtagatttatttttagtagtttatatgataaataaatattgcgtttgatttttaaatattaaattatagtatattatagatagatatagagttattatttaaagtatgatattttaattttaaaaggttttttttgaagaatattataaattttttttttttttaagatttgttgggtaggaaagatgggagaaaatgaattaatgtttatatagaaaggaggataatgggggtaaaaataatagatgaacgtatgggtggatgagagaatggataaaatgataggtggatatgttgattttggatagatgggaaatgagtggatatattaataaatagatatgtgggtggatgggtggagaagaggatggtggatggttgtggttttatgaagagatgtgaaaaaggaagtgtggaatgatggatgagaagttgtatgggaagatgaatagaagaataggtggttgaataaattaaaaggtgtgtggttggatgaatgaatgagtgggatgatagatggatttaagtggttagtggatggataggaggatggatggatgtgagagttttagaaggatataaggaaagatgggtggatagatggatgggcggatggaaggatatttaggaggatgaatgagtatgtgtgtggagagaggtgtttatttatattggtttgaatatatgggttagttgagttaaatgttagttttatgataggttattagtagttttttttgagttgttttgttaagaagttaaaatttatttaagttatgtggatttgttattgaggggaaaaagaatgagttttttttttttttatttggaagatttattaattttttattttttattttttattgtgggtacggaggtattgcgttatttagggtaagatttcgttttttttttagttttttttttaggatatttaatattttgtgaaatttagagattttgttttagtcggatttagagaaatttagcgggaaaggagaggttaaaggttgaatttaatggtgtaaggttttacggttcggttattttttgttttgacgtcgcggggttagcgggagaagaaagttagtgcgtttttgggcgtaggggttagtggggttcggaggtataggtatttcgcgatattttaggtttttcgatttacgtttttggtagtttcgattatttatagttttagtagagtacggggcgggggtagaggggttcgttcgggagggttgttattttttaaaatttttgcgggttgtttagttatagttttttttgtttgggtgtgtttttcgttcgtttttttttttcgttttaggttattgtttttaatttcgaataaaaattgtagttaattttcgaggtagttttattgtttagcggattttagtttttgttaggttcggttcgttattttcgtttcgtttttcgtcggtttttgtttcgcgtttagggattttttagtttttttcgttcgcgtttttcgttcgtttcggatattatggataagttttggtggtacgtagtttggggattttgtttcgtgtcgttgagtttggcgtagatcggtgagtgttcgtcgtagtttgggtagtaagatgggtgcggggtgtttagcgcggattcggcggtagttttttcggttgagtcggttttgggggattggagttaagtgagttgtttgcgaagtgtattgggtttcggaaagtagggttgggatttgcgttaaatcgttggagaatgtgtttgtggaagtattatttggttgaaagaaaaagagaaagagaagaaagtttgttgggtaggttgtcggcgcgtagttttgggcgaggtcgttagagttgtagtatatggtagaaagtaatcgttttttcggatgcgtatagtcgttgtttggattaataggtttttgtgtttaagggttcgttaagttttatcgggttgtgtttaggtagggtagagttgggcggggta

SEQ ID NO: 172 - DNA, 2501 bp, Artificial Sequence
  chemically treated genomic DNA (Homo sapiens)
tgtttcgtttagttttgttttgtttagatatagttcggtggggtttggcgagtttttgggtataggagtttgttagtttagataacgattgtgcgtattcgggagaacggttattttttgttatgtgttgtagttttagcgatttcgtttaaaattgcgcgtcggtagtttgtttaataaattttttttttttttttttttttttttaattaaatggtgtttttatagatatattttttaacggtttagcgtaaattttagttttgtttttcggagtttaatgtatttcgtagatagtttatttgattttagttttttagggtcgatttagtcggaggggttgtcgtcgggttcgcgttgagtatttcgtatttattttgttgtttaggttgcggcgggtatttatcgatttgcgttaggtttagcggtacgaggtagagtttttaggttgcgtgttattaaaatttgtttatggtgttcggagcgaacggagggcgcgggcgaaaggagttggaggatttttgggcgcggggtaggggtcggcggaggacgggacgaggatggcggatcgaatttggtagaggttggggttcgttgggtaatgaggttgtttcggaagttggttgtagtttttattcgaggttgaaaatagtgatttaagacggagggagggagcgagcgaaggatatatttaagtaaggggggttgtgattaagtagttcgtagaggttttaagaagtagtagttttttcgggcgggtttttttgttttcgtttcgtgttttgttgaggttgtaaataatcggggttgttagggacgtgggtcggggaatttggagtgtcgcggggtgtttgtgttttcgagttttattggtttttgcgtttagagacgtattggtttttttttttcgttggtttcgcggcgttaggatagaggatgatcgaatcgtaaaattttgtattattgggtttagtttttggttttttttttttcgttaaatttttttgaattcggttggagtaagatttttgggttttataggatgttggatattttgggagaggagttggagagagggcgaggttttgttttgggtggcgtagtgttttcgtgtttatagtggggagtgaggggtggggagttggtgaattttttaagtggaaagagggagagtttattttttttttttttaataataagtttatatggtttgaatgaattttagttttttggtagaatagtttagggaaagttattgatggtttgttatagggttggtatttggtttagttaatttatgtgtttaagttagtgtgaatgggtatttttttttatatatatgtttatttatttttttaaatatttttttattcgtttatttatttatttatttatttttttttatgtttttttggggtttttatatttatttatttttttgtttatttattaattatttaggtttatttattattttatttatttatttatttaattatatattttttaatttatttaattatttatttttttatttatttttttatataattttttatttattattttatatttttttttttatatttttttataaaattataattatttattatttttttttttatttatttatttatatatttgtttattgatatatttatttattttttatttgtttaagattaatatatttatttattattttatttatttttttatttatttatacgtttatttattatttttgtttttattatttttttttttgtgtaaatattaatttatttttttttattttttttatttagtagattttaaagagaggaagagtttgtaatattttttaggggaagttttttgagattgaaatattatattttgaatgataattttatatttatttataatatattatggtttaatgtttggaaattaaacgtagtatttatttgttatgtgaattattaaaagtaaatttgtatggattttttgtttggtgagttatatagaaaatgaaagtgattattagtggttgtggtaagatgaaaggaattatgttaggatttttgagggaaggtaagattttgttatttattttaagaaattgaaaagttgagagaaatgtatttagttatttttttatgtatttatttattagatatgtaatgagtgttgtggggtatcgaggtaaataagatttggcgttatttttagagtttttattttttggtacggaataaaatttataagtaggttattattatgtaaggtgaaatatgttgtaaaatgtgtgtgtttggggtgttattatttttagagaagggagttatatttttttttggagaatattaggtagtttttataggggaagtgatatttgaggtaggttttaaaggaaaaggaggaggaattttttagatgaaattatagggataagtaagttatttataggtagtatagtgtagtgacgaatagtatggatttaggagttagaatat

SEQ ID NO: 173 - DNA, 16579 bp, Artificial Sequence
  chemically treated genomic DNA (Homo sapiens)
tgttttttaaaatgatgtttagttgaattagttaatggagataaaaatatttatatataatttttttttaagtttattagttattttatagattagttataattttggttattttaatgagttaatttttttttagagatattataaattttttaaagatggaaaataattgttatttttttgaataatgtttattatttaaaataatgtatataaaagttgtttaataaatttttgttgaattgagagaaaatataaaaaattgaaagtagtttgtttgtaataagtgtttgttaagttttatagatttttttttttttttggaattattgtaataaatatttgatttttgatttgtaggattaaaatgtgattttttatattttaataggagtaagtattagttttgtaattttttttgttaatagaataaaaatggaatgtatgtttgttgtttttatatgtcggttgatatttatgttgaatattttttttataacgtagaggtttttttgttttttgttttgcgttttatttttgtttattatagagatattaatgatgttatgtgtttttttgtattattagtgtagtagtttttattatgttttttgtttcggttttattgtagtttaattaaataaatggaaacgggtagttattgaaaataaatagtaattgtaaaagttttgttttttaagaaattttttgtattgtatttcgttttgttttattgattttaagatttttatcgtttttttgtgtttagaaattagattttttagtttgttttgttttagttagataaatgttttataaaaatgatttatattttttagattgtggggagagaagaaaaagattttgagaaagtgattaaggagggagtaagagtgatataatttttgatttaatttagttggattgtgttttttatgtttttatttttttttttataaaaaagatagcgtttttgatgttttgttttaggtagttttttagggtgagtgtagatgtgttgagttatttggttgttttgaggatcggtttagagagtttttttttttattaatgaagttattttttttcggtagttcggttttttttattattttatgttggaatttggttttggtttgtatagttttgtcgtgatgtagatggttttttagttaagttttagagaaatttgtttaattatgaataggatatttatagtataggagaaaaaaaaatttattaaaataaatattttattgtaatattttgatttgggggttggagagtaaaaatttaatatttgatgtttgggaaaaatttaatgttttatggttttttaaggaaatttgtttgtgtttaatttattagagtaatttatatatttcgggttaaagtataatgagattgttattattattttgttttttgtaagattttttttttaagaataaaaagaaggtaataaagattttatatttttgttttttttagaaagttaaagagaatttaaagtgttggatgaaatgtttgtttttaatttgtagtgttttatttaaaaaaaaaattatgatataattttagaggataggttttttttttttagggtttttgaaagttaaaagtatatttttaatttgtagtattattgtattatttagtgaggataatttgtttagttgtgtttaggattagttagattaaggagttgaaattaagttttttttgaatttgaatgggattggaattttgttatttttagagtagtaatagatgatgttatgtttaagaatattttatttgattaataaaaaaggagaagtttgaaatgtaattttaaagaattttagaaggaggtttagatgaagataataaaattttttggagatatatttgttatttatattttttttttttaagttattggtttgttgtttttgagtttagttaaatttttaaagataagattaaagtaaggaagtaaggtatatagtttttggtttatggttttttttagatataagtattgtgaatgaagattttgttttatttatatttgggattttggagtttttataaagaatatttttagtataaggatgtgatttaaagggggatttatagaataatattttaattattgtttgatttatatttgagtgtaatggataaataaatataattttagttataaaatttgaaaaatatatatttttttatttaaaaatttttgatagttttgttaggtattggagaattagaaataaatgtttttttatttttttttttttgatgaaggaaagttattaaaaatagttatatagaaataataatataattgtagattttattttaaatatagttggtatgttttttttttttttttttatttattttttattttagatagttagaggggaaagtttgttttagagatagaaagaagatatttatggggtataattttattttagttatttgatagtttgaagaagtatttaattttttgaataataatgttataagttaaagaagagaaaagataggtagtttaaagttttttaatattgtgtatattttaattttttaagttagttttgagaaagtgtttttgttttgtagaagtatttggttaagtgttgtgaagtttattggtattaaaagaaattaaaaattttggaggattagagaattaaatttggtaatataaatgaaaatattttagaatgtaaaaagtatttaatttattatttttaattatgttttattatatatagatggtattatttatagtgaatgttaattattaatatttttttaaaaatgggtattaatttgttattagttgtttgtttttgatttagtttttttttgttgaaaggttttatttaattgtattataaagggataaaagggtaaaagataataagttttttagattggtagatttgttatttataaaatggttttgggtaggttatttgaattttttgaaatttaattagatttatttaaatttaagaatgagaatataaatttatattttgaagtgttttatagaaaggtttattttaatgtttggagtatatattttaatgaatatttattttattttatttttttttatttttgaattaagtaattttgaatttaaagttgttatgattagtattgaaaagattattggattattaattgtgtgattttgggatagtaattttttgtattttagtttgtttatatgttatatatgaaggttgaagtttgattttgttttgtgattattattttaaatatttgatgaaattaaattttagtgtttggaatggtagtataataaatttattaagaataaataatttattgtaaaaatatattgatttttaaatgatgtaattgatagttatattattgtagagggttgataaataataaaagaaatgaaagatgtatatggtgagaattgaaattattttgataagttttttatttgtttattatttaaaattaatgattatgttgaatgtttataaattataaaatataaaagaaattttataaatgcgtatgtataggagtttaagttattaaaagttttaaagtataagtttaaattaaattaattaaagaagttgagaggaaaaattggtttttatttttaattattattgttttgaggttttatgtttaatataattttttaagtagaggttttagagagaagagttgtgaggatatttttatatttgtgtagaaggaaaagtttgttatttattttagtatttttagtgttatattgatgtgtattttggatttattttgtttttattgtataaatttatatttgattttaaagaaaaggaaaatttaaagttttttttttttaaggggatagaaattttttgtgttaattgtttgatttttttttttgtaaggttttattggaaattttttgtaatataatgtaggggatttttttatgtgttgatgttgtttatatagtggggtgggtttgattgaagaaaaaaaatcgtatatacgtatgaaagattatggttttattttcggaaagtatgaaaggtgattgatatttttaagaagtttttgttatttaggaaaattattaaatattttatttagagatatttggaaagattgaaggaaaggaagaacgaagaaagtagaatttagatttatgtggggagagatttgtggtagaggaaaagtattttttttgaattcgataagggatttgtttgggggaattttttgtttagttttttattattagggttttttgaagtcgggttttttattgggtagttttttgggagtgtagtggggaatttttatattttttttttaggttttcgaaggatttcgtttttttagtgttttttttaggttggtaggagttttgagtttgatatttttttttgatgggataggtaagttttgtgggcgcgtaaatacgttgtaattaagttttttgttgattttatagttttgtgtgttttcgagaagaagtgatcgtatttaattgtttattgttggtttgttttttaagagtttgggggttttttttttttaatttagaattagttgtacggggggcggggaagtgggggtggggaaggagtgggagggtagtggttttcgcgagtagagcgatgttattgagtgagtttttgaatggggagcgttgttgtttttaagtcgattggtattttttgttaggaagaaacgttaagaggtgggagtgtttggggagggaggtaggcggtttttatcgtaggcgcggggagttgttttttcgttttttcgtttgttttttaagtttggatttttaggagtggttgaagttgcggagcgtttttggagtttgtgaatgaattttttttttttttttttttttttttttcgttgagtttttttttcggttttgacggtatagtgatataatgatgatgggtgttataattcgtatttgaatttgtaggcgagttgtttcgagtttttttggggaagaattttaggcgtgcggacgtaatagtcgagaatattaggtgttgtggataggagttgggattaagattttcggttagtttcgtattttttcgtattttttagtatcgtttcgtatttttcgtattttttttcgggttattacgttttttatgtgattcgtttgggtaacgtcgaatttagtcgcgtagcgttgtagtgaattttttttttaaattgtaataagtcgttttttaaggtaattacgttttttttgttttttttttaaaaaataaaaataaaaaatttatagaaaaaaattcgcgagtttagaaaaaagaagtaattggtagaaggttttaattaaggtaaagagttgtaaggcgaagttaagaaaatgtaggtatttaaaaaatgtaggtaatttttataaaggtttttggggagaggtatatagagggattttggtgttgaaaaagatttagataaaagaaatttagggtggggtgggggtaaaatgattaacggaattgggggaagggagggaataaattgtaaagaaattatagaaaagtggtgggtttttgagttggagagaagagagggatttttggtattttgatttttttgttgttgttgtttttaatacgttcgaggtaaaagtttgaatggggattattaagatttgttatagataagttttcgaagtcgttttggtgtaggttatttggttttttagtttttggtgtgtggttagtgtttggtgtttttggaaagttattttcgggtagtttttgatagtgcgattcggcgtttaagtagtttgggattttgcgcggatttgatttttttagatcgtaggtagtttgggaggaggttcggtcgggggaggtgtaggattttcgtcgtgtttttttgacgatttggggattgttacggttttttttcggcgtttttgggtttttttgttttgtacgcggtgcgaaggggttagtagggaaggagtagaggatggggggtggggttgttggagtttcgcggaggtttgggaggtttttgggcgggaaaagtttgttttgaatcggtagggatgtgtaataattttttttattttgaagagtgaaatagggtttgtcgtttttattttaataagtaaatcggtatttagagcgtattgtagataaaggtggttcggggattcgaattaggggtttttgggttagttttttcgtttagattataggagtttttcgtttttttatatattttttatttttttttagtttttcgttttagttgagtaattttattggtaggtttagcggtagcggcgcgcgcgtgtgtcgggagtttcgggggacgttttcggttggagcgttttatcgttttgtagaggcgtgggcgttgtagggcgatatttttggtgcgtgtagatttagggtattcgggttgttttggttcgcggtttgtgttattgggcgtggagcggtttgggtgttaggtagaggagagcggggtagaaaaatagtgttatagtttaaattatttgttttttaatttaattgcgtttcggtaagttttgtatgtttttgggagatgttgcgggaagggggagaaatttatacggcgtttggagagttgttttgtcgcgcgtatattcgcggtagagtttttttgggtcgcgttttttatttttgtgtttttttttgtttttattttttttgttttttttttttttttttagtttttgttttttttttttagtttttgcgtttttttttttatagttgataaatgaatggttagtgtgaaatttttgtttttttcgtgttttaaggtagtagggagggaggagcgagggaggcggtgcgttttttcggatttgtttttagtttagtttataagatttgtagaatttagatgtttaggaattgggagttttgcggcgggtgtgggcgttttttgatggagaagtttcgtataggcggagaaaaataagttttttagattaagcgtgtattttttataattttgtgtttaaggatggaaggttttagtttttttttaagttatttattttgtattttataatttgcggcgtatatttaggagtttggaggattttgaaaaaaggttttggtttgtgtaaagtgtagagatgttttttcgcgagtcggttggaacgtacgcggcgttttgggtttagttcgtcgtttagtggacgaacgtatatggtcggggtggagttaggtttcggaggtttagacgcgttattttgggcgtttttaagaaagataatatatatatcgtgtttttaaaatttatgattatttgaatttaacggtagggtttcgttttaggatattgtaaaagaagggtttttaatttaaaatttaaatttttttaattttagggcgggcgtcggacgggaaagtggagagaaggcgggtagtgggaggaaaaaagaaagggaaggaagggaagtggaaggaaagaggatcgtggaggggaggaaaaggagaaaggaacggagatggggtagatggtatttaaatagttaggaacggatcggaagggttcgtttcggggtttgggtttgaatttcgagattcgttttaggatattttttttttttttttagcggtaataaatgtgattgtagaggcgtgtcgggatggaagggtgggaaagaattagataagcggaggtggtttagtttcgtttaaaggggttgggtttggggttcgtttttattcgtttatttcgcgttaagggaggattcgtaacgggcgtttttcgtagcggttgggttagttagtcgttacgtgggttggcgtttcggtttttagtcgagacgggtgtgattttttgggtttagagattgtagtatagtcgtataggcggtcggcgtagtcgaggtttttatttatcgaggttaatgggggcggggcggggaaggtagggtttagtttaatcgagagagtcgagtggtttcgttttcgggattcggggtcggttgtttttggagttgattcgagttttatttagatagcgttgaatatttttattaaaaggttatttaagttttattttattttattttatttttgtttgttttttgggagtggtaggaggggtatcgtgtttttgttttgaggtaggggagaggttaaaatttattttaagtaaattttttgttagaaaaatgagattttatatcgtattttatttgttgattttttaaatatatttaggttattttaaagtttatttttagttaattaatagattaatttcgttttagattgttataaagagttcgtttggaatggtaaatattgttattcgataagattaatagaattttatgggggtaaatatggaagggttgcgagtgtaattgaggtttttgtgttttaatgaggaattttagcggggatttggcggggattggaagtttagtatttatttagggagtgattgagttggaaatttggagaagtttggtgtagacgagacggtgttttttagagttgtattttaagtttttttattttgttgtatattggaagaattggattttaaagattttttttattattttagattttgtagttaatagttacgtttttttttttttgtttgttgaaagttgtgatttaattgttttaagtattttttgataatttcgttaaatttattttgaaaatatttatataaagttttaaaataggatgttgtgagtgtaatataaaaataggaaggtattaatggaagtaataattagtgttttgagatagaagcggtttttagtttgtaatttggaaatgttaagagtagtatattagggagaaggtttttaagagtttgattttttgttttgagttttgagtaaagaaagaaatatgttagaattgtattgtttgttcgtagtaatattgtaaagggttttaatggattttaatgtgattgagtaattattttttttagtattaagtttatagtttttaatttttttgtgagaagattaggtaggaagcgggatgagatttaagataattatttaggatttatgttagaatttaaagttttgatttttttggtagataaaaatagagttggttttaaattgtattttttgtttttaaaaaaacgaggtttgaaaggaatttttttagatttatataggtttatagatgtaagttttttttttttttttgtgtttgtaaattggagggagatgtttttgatattttagaatatttgtatttatatatttgtaaattttgttaggaaaggatttaaatagttaaattaaaggtgattatgattaatgttaaagatattatttattgtttttttttttgttgtattattaggtttaaatattttggagttaatgattggttatttaattgagtaatagagtttttgagagcgtaaagattaattaattttgttttttaaagtttggtaattaagttttttttttttggtgagatttaaatatttttgttgacgttatttatggataaatatcggtaaatattgtatttaaaatgggatattgttttgtgatggagtagaattttttaagatatatggtttttttgaaagaaagaattaatgattgtagtaaggtatttttttattatttacgtagagaaattagttaggattgataaatatttattgttgggagttatttgttttggtttgagaaaatatgttgattgttatataggtttgtattttattagaaaatataaagtatgtattttttttgatttggaattagaaaagggggattagatatggatgttttggttaagttttattttaattagtgaatttttgttagtttttttttgtagtttagatttggtaaattatatatatataaagtttgtgtgtgtgtgtggggtgcgtgtgtgtgtgtatgtatatagggtttttaaatattgttaagtttttattattgaatgtgttagaggtggttgtattttagaggttagtataaagaatttttgtttaatgtgttagttttgttttttgaaatatatttttgggtagatttattaattataaaaggatataaatgtatatattttttatatttgtatatattttattttatttttttaaggattttaagaggtgtttatgtttataaaatgagattatatattttataataaatatatttgataaattataatttttttattattaaattattgatttgatattatttgaggtatagtggaatgagtattagatttggaattagaaagtttgagttggatttattagttgagaaaattaagtaaagatattatttttggatttttagtgttataatttattaaatgaatatgtagttataaagattaaaagagtaagtattttgaaaaattatataaaaaagggatgataatatattatgttttgggatttatattgatttaattttataattttaataataattgtattatttaagttatgtagtttttattgaatttataaaataaattagagaggggtatattgttttaaaaattgtttagttttattaattagaagatagattatagaaattgattttaatgaagttggatatttagtggaaaggaagaattatttaataaatggttttaggataattgatgggtttatgtaaaataagaattagtttttatttgattttttattttaaaagaaatataagatgaattaaatatgaaatgtagggaataattttttataaaatgataaaagaaaattatgggattaaaaaaaataagttaggaatagagaaatttgttttaagtaaaatataaaatttagtgttattttaggaaatattgataggtttgattaagtaaaaattatataaaagtaaataatatatttggaaaatatttacgatatttgagagataaaaagttaataatttttgatattttatggatttttatgaataattttgaaaagtttatatttattaaaatatgagtaaaaattatgtataggtagtggtagaaagagatatagagttttaaaattatagaaaaaatcgtttagttttatttgtaattaaataaatagtaattaaaatattaatgatatgttatattatttttttattaattagaggagtaataaaaaaaaataatttttttttttttttttttttttgagatggagtttgttatttaggttggagtgtagtggtacgattttagtttattgtaattttcgttttttaggtttaagtaatttttttgtgttagtttttttagtagttgggattatgggtatttattattatgtttggttaattttcgtgtttttagtagagtggggttttattatgttggttatggtagttgattttgaatttttgattttaagtgatttatttattttagttttttaaagtgttgggattataggtatgagttattgtgtttggtaaaaatgaaattaaaaagtttgatgtaagtttgtgttggttaggttgtggagaaattgggttttttatatattgttgtatgaaagtaaataggtttttttattttaaaaaataatttggtaattatttttttttgattttttattaaaagtttttaaaagatgtatatattttttgatttagtaattttatttttcgatattattatatggatggatattggtattaatattatttaagataaatggataaggatgttttttgtagtattgtttttaagagtaaatatttggaaatagtgtaataggtttattatagggaattatttaaataaaagttgttgtatttatttaatggaaaattatgtagttgttaaaaataatatggaaaaattgtatttgttgatttggaatattttttaaaatatattgtattttaagtgaaaaaattgatagataaaattgagtatatattatatatttaattatgtaaaatgggtgtatatttatttttttaataaatatttattgagtgttttaggtattgtggatataggagtgaataaaatattaaagattgttttgttggaatttttattatggtaggtagagaaaggtaatttttaattatatatgtaaaatggtgatatgtgttaggatgaaaatagagtatgggaaagggaatagagtatagtatgttttaggtagagtaatgagaaaggagtttattaggtagagaatagaggagtgttaaggggcgataatgtgaaaaagtttagttaagtttaggtttaggaatttatatgatgttattatttgtatgaagtaaatttatgaaatttcgtatttaaattacgtgatttttttttgttgtataatgattttttttgtgagaaagaattagtgagtaatatgatatgtgatgtttattatatttattttgtagttgaagtattttagaaagttggttgtttagggtatttaattagtagaatggtggataaaattatcgtgtttttgtttttaagttattttttgttagttgagtttttttaaaattaagggagaatattaaatatttatttaatagaattttggttttttttcggaggttgtttatttttggtgtgttttttattttttttgtagatattttttatggataggagttttattgattttgttttttatgttttttaggtaattaaatagttttagtattttgtatttggattgtttaatgatttttttttttttttattgattttattggagtagaaggttaaatataggtatttatttttatattttttaggtttttttatgtagatagagttgttattattagtagacggtgtttataagagagatatggaaaagtggaagaatggaaatagggatttggagtggtgttaaaaataaagaaagaggtttttgaaagttttttatttaatatgattaaatatagaagataaaagatgtaatttaatgattaaggatagggatatagttttgagaaaattatagaagtggaatgaacgttttggattttaaagaagagggaatggaaatgtagttttgaggtagttaaagttaataaagttttttgatatatttattgtagaaataaatgattattttttaatttaaggtttgtaaatttaggtgattataggggcgaggtatggagtggaaatgggtaagagattaagtgggggtagtaatggttttgagtatatagatttaaggggagagattgttgtttggttaatgtttatgattagttagttgaaatatagatttagtgttgttagattttttgattttttgaaagaagttagagattttatatttagtgtaaatagtttaatttttaaattgagtaatttatttaaatatatttatgtaatttatttaaatgtatttagagtatgtttgattttttttttgtatttttatttagttttaggggtaattttaaggaaagtgatgcgtatatttgttgtatttatgtagatggaggattatttttttttttttaataaaagatatttttataaggattgagtgtggtataaagagttcgatttttagtatttaaattgagtaggaaatttaaatatagaagatttttttttgggttatatttttggtttttttaaatgagatttgattttttagatattgataaatattatattattgggttatggtaaatttttaagtggattgatttaaaagtgtttaaaagtattttaggtgttaaggaattgttggtacggagttttaaaggtgtttttgtataagaaatagaggcgttgattatgtatttgatttataaatattttttaaggatatattttgaatttggtaatgaagaaatattgtgggaattattaagttgaataaagtattagttttgttttttagaagtttattgttttatagaggagattagatatgtttatagataatttgaagtatatagtaataaattataggatgatttattttaagtataaagtgtatattgttattatagtggtaatttaggttataatttttaaatgtaagagttttaaatattattttttttatttttagtgatatgaaattatgttagaatatttgtagaaagtttgaattagtaattttaataataaatattgagtattgatatattgtatattattgagatttattttatatatattattttattaatttttatgattatttcggtaagtattaatttttataattaagtagtgatagaaaatgaggtttagagagatatagtattttatttaaagttatagaatataagtagagaatgtagaatttgtattttgggttatttgatagtggagtttagatttttaaaattaggtttataaagattttttggaaaaaaagaaaaataaaaaatagagaataaatttttttgaagaaaagtaggaaattattatttataagtataattaaagagagatttttaattttttttttttttttttttttgagacggagtttcgttttgtcgtttaggcgtaattttagtttattgtaatttttatttttcgggtttatgttataaagaaagtttttatttgattggttcgatttgattgtttattagaatataggttttttagtagggttaataagttataatagttttagtgatataagataaatataaattaataataaggttaatttagaattattaatatatgttttttattgtgaattattagttggtttatagatggaaaatataagatatataatgtattagtttaaaaaatgttttttagagagtgtttagaattatagaatttaaaaattttgttttgaaaaggtttaatttttattttaaaatatataaagaaattaaatgtaaaaaaattaagagaaaaggttttaattaattaaatgttgtataattttaagttttatttatgtttaagattagttttgtaatttatgattaattttagtattagtttgtttttaatttaggtttgttaaataatatagaattttttttttaatgaagttttttagggttttagttgaaaaatatatattagttaggatgtttttaattgtaaggaataaaaagttacgattttattgggtttaaataataatgatatttataattttatataaaatgaagtttaaaggtatggtttattttaggtttaatttttaaggatttacgttttgtttttgttgatttttttttagttttatttttagaggtattttatttatttatggatgtaaaatttttataatagttttagtagaaagattttagtatgataatgtttagggaagaaaattgattatttttttttttgttttttttttaggatgaatttattttttttagggattttttattggaggaagagatttttttatattttattggttaaaattatattatatattgttttaaatttaattattggaaaagggaatggtatttttataattgatttaggatattaggattattttttgggttggggtttgatttaggattttttaaagtatgtgattgagggtaggtattagaatggaattagagttgtgttagaaaggagaaacgtatggttattatagaatagttttaaatgttatcgaggagggtataattgtaaaaattaaataattttttgttatttttttgaagttggtattttgatttttagatggttttttaatataggttttttttttttttattattatagttgttttgaaatttgagttggaagggaatattttgagatttagattgttaaatgttttttttaaagttatgtaataaattaaatggtaaagttagggtagttttttgatttagtatagggtatttttttttattttttatttttgagattttagaattgttggtattgttttaaaatttatggtaagaattggttatttttgtaattaatatttttttataatatatttgttttgtttgtttagttagttagaaattatatggagtttgtgttttaaaaagtttgtcgaagtttttattttttgttttggtattatgtgtatgaattattaattggtttttttttattttatatttgatgaagatgttttttttttaatatttttttttattgttttttatttttttttgttttatttatgattagttgtttgtttttaaatagattttgtggttatttatttttttttgtgttagtttttatttattagttatttgaattgtggtttttattgttttttatatagtttatttatttgtggttgttatatatatttatattgttatatgtttttaaattgtattttggaatgattttggtaatggttgtattggatgagatttaaattaataattaaagtattgagatagtttttgttattataagtttatttttgtttttatagtttaagaggagttattttttttatttttattatttaatgtttaatattatttttattatatataatgtataaaaagtatgtgatttatgatttattttaaatttgaatgtttgtgatttattttgtgtttttttttatttttagg

SEQ ID NO: 174 - DNA, 16579 bp, Artificial Sequence
  chemically treated genomic DNA (Homo sapiens)
tttagaaatgaagaaaaatataaagtaaattataagtatttaggtttaaagtgggttataaattatatgttttttgtgtattgtatgtaataagggtagtattaagtattaagtaataagagtagaagaagtagttttttttggattataaaaataggagtaaatttgtaatagtagaagttattttaatgttttaattattagtttgaattttatttaatgtagttattattaaaattattttagaatatagtttgggaatatataataatgtggatgtgtgtgataattataagtgagtaggttgtatgaagaataatagagattatagtttaagtaattagtggataggagttggtataaaaagaaatgggtgattataaagtttatttagaaatagatagttgattataaatagagtaagagaagatggggagtaatagagaaagatgttgaaagaaaggtatttttattaagtgtaaggtgagaaggaattaattggtggtttatgtatataatattaaaatagagaataaggatttcggtaggttttttaaagtatagattttatgtagtttttagttggttaagtaaataaaataaatgtattataaggaggtgttaattataaaagtgattagtttttgttatgaattttaaagtagtattaatagttttaaagttttaagagtaaagaatgaaagaaaatattttgtattgagttaagaaattgttttggttttgttatttaatttattgtatgattttggaaaagatatttaataatttgggttttagaatgtttttttttagtttaaattttaaggtagttataatgatgaggaggagaagaatttgtgttggggaattatttagaaattaaagtgttaattttaaaagaatggtaaaagattatttggtttttatagttgtgtttttttcggtagtatttagaattattttataatagttatgcgttttttttttttaatataattttggttttattttagtgtttatttttagttatatattttggagaattttgggttaaattttagtttaagggatgattttgatattttaagttaattatagaggtattatttttttttttaatgattggatttggaatagtatataatatagttttggttagtgagatgtgaggggatttttttttttagtgaagggtttttgggaaagatagatttattttgagaagagaataaaggaagaggtggttagtttttttttttggatattattatgttggaatttttttgttggaattgttgtagggattttgtatttatgagtaagtgagatatttttggaaatgaagttgagaaagaattagtaaaggtaaggcgtaagtttttaaggattagatttagagtggattatgtttttgaattttattttatatgagattataaatgttattattgtttaaatttaataaaatcgtgattttttgttttttatagttgaaagtattttaattggtatatattttttagttgggattttgaaaaattttattggaaaagaaattttatattatttagtaaatttagattgaaaataagttaatgttgaaattagttataaattataaaattgattttgaatataaatagggtttggagttgtatagtatttaattaattaagatttttttttttaatttttttgtatttgatttttttatatattttgaaataagaattagatttttttaaaataaaatttttaaattttataattttagatattttttgaagagtattttttaagttaatatattatatattttatattttttatttatagattaattgataatttataatgaaaaatatatgttgataattttaaattaattttattattagtttgtatttattttatattattagaattgttatgatttgttaattttattggaaagtttatgttttagtagataattaggtcggattaattaaatagaaattttttttatggtatgaattcgggaggtggaggttgtagtgagttgagattgcgtttgggcgatagagcgagatttcgttttaaaaaaaaaaaaaaaaaagaaattaaagatttttttttaattatatttataaataataattttttatttttttttaggaaaatttgttttttattttttatttttttttttttttaggaaatttttataagtttaattttaaaagtttgggttttattgttaaatagtttagaatgtaagttttgtattttttatttatattttgtgattttgggtaaaatattatatttttttaaattttattttttgttattatttagttgtgaaaattagtatttatcgaagtgattataggaattgataaaataatgtatataaaataaattttagtgatatataatatattagtatttaatatttattattaaaattattaatttagattttttgtagatgttttaatatagttttatattattaagagtaaaaagaatagtatttggggtttttatatttgaaaattataatttaggttattattatagtagtaatatatattttatgtttggaataaattattttataatttattgttatgtattttaaattatttgtaaatatgtttaattttttttgtagaatagtaggtttttggaaggtagagttagtattttatttaatttaataatttttataatatttttttattgttaggtttagggtatatttttgaggaatgtttgtagattaaatatatgattaacgtttttattttttatgtagaaatatttttgaaatttcgtgttaataattttttaatatttgaaatatttttgaatatttttgaattagtttatttgaagatttattatgatttaataatatgatgtttgttaatatttagagagttaaattttatttaaaaaaattaaaggtgtgatttaggaaaggattttttgtatttgagttttttatttaatttaaatattaaaaatcgaattttttgtgttatatttaatttttataaaagtgttttttgttggggagaggagaatggttttttatttatataggtataataagtatacgtattattttttttaagattatttttaagattaggtaagaatataaggaggagattagatatgttttaaatatatttgaataagttgtataaatatgtttgaataagttatttaatttaaaaattagattgtttatattaaatataaaatttttaattttttttaaaaaattagaaggtttagtaatattaagtttatattttagttggttgattatgagtattaattaagtagtagtttttttttttaagtttgtgtgtttaaggttattattgtttttatttagttttttatttatttttattttatgtttcgtttttgtagttatttaagtttgtaaattttgaattaaaagatgattatttatttttatagtaaatatattagagggttttattgattttagttgttttagaattgtatttttatttttttttttttggagtttaagacgtttattttatttttgtaatttttttaaggttatgtttttatttttggttattaagttatattttttgttttttatgtttgattatattaaatggaaagtttttagaagtttttttttttgtttttagtattattttaaatttttatttttatttttttatttttttatgttttttttataagtatcgtttattagtgataataattttgtttgtatggaaagatttgagagatatgagagtgaatgtttatatttagttttttattttagtgaagttaatgagaagggaagaaagttattgaataatttaggtatagggtattgagattgtttaattgtttgggagatataaaagataaggttaatggaatttttatttatgagaaatgtttgtagggaggataagggatatattagggatgggtagttttcgagagaaagttaagattttattaaatagatatttagtatttttttttgattttggggaagtttagttgataaggggtgatttaaggatagagatacggtggttttgtttattattttgttaattaggtattttagataattaattttttaggatattttagttataaagtggatgtaatgagtattatatattatattgtttattggtttttttttatagaaagaattattgtatagtagagagaaattacgtgatttaggtgcgaaattttatgaatttattttatataagtaatagtattatgtgaatttttgaatttggatttggttaagtttttttatattgtcgttttttagtatttttttgttttttgtttggtgaattttttttttattattttatttaagatatattgtattttatttttttttttatgttttatttttattttagtatatattattattttgtatatgtgattgggaattgtttttttttatttattatagtaaaagttttaatagagtagtttttgatgttttgtttatttttgtatttataatgtttagaatatttagtaaatatttgttaaaagaatgaatatatatttattttatataattagatgtataatatatatttagttttatttattaatttttttatttagaatataatatattttggagaatgttttaaattagtaaatataatttttttatgttatttttgatagttgtatagttttttattaggtggatatagtaatttttatttaaatggttttttatgatgagtttgttatattgtttttagatatttgtttttagaagtaatgttgtaaagaatatttttgtttatttgttttgggtgatattggtattaatatttatttatataataatgtcgagaagtggaattgttgaattaaagagtatatatattttttaaaaatttttgataaagaattaaaaaaaagtgattgttaaattattttttgaagtagaggaatttatttatttttatataatagtatatgagagatttagtttttttataatttggttaatataaatttgtattaaattttttaattttatttttgttaggtatagtggtttatgtttgtaattttagtattttgggaggttgaggtgggtgaattatttgaggttaggagtttaagattaattgttatggttaatatggtgaaattttattttattaaaaatacgaaaattagttaagtatggtggtgggtgtttataattttagttattagggaggttgatataggagaattgtttgaatttggaaggcggaggttgtagtgagttgagatcgtgttattgtattttaatttgagtaatagattttattttaaaaaaaaaaaaaaagaaaaaaattatttttttttgttatttttttgattggtgaaaaaatggtgtagtatattattggtgttttaattattatttatttaattatagatgaggttgagcgattttttttataattttaaaattttatgtttttttttgttattatttgtatataatttttgtttatattttgatagatgtggattttttaaagttatttataaaagtttatggaatattaagagttattagttttttgttttttaaatgtcgtagatgttttttaaatatattatttgtttttgtgtaatttttatttagttagatttattagtattttttagaatggtattgggttttatgttttgtttagaataggtttttttatttttaatttattttttttaattttatgatttttttttattattttgtaaaaagttattttttatattttatatttgatttattttatattttttttaggatgagaaattaggtagagattgatttttattttgtatggatttattaattgttttgaaattatttattgaataattttttttttttattgaatgtttaattttattggagttaatttttgtaatttgttttttgattaatgaaattaaataatttttaaaataatatgtttttttttgatttattttatagatttagtagaaattatatggtttgggtaatgtagttattattaaaattatagaattagattaatatgaattttaagatataatatattattattttttttttgtatagttttttaaagtatttatttttttgatttttataattgtatatttatttaatagattatgatattaaaggtttaaaagtaatatttttgtttggtttttttagttagtgagtttaatttaaattttttgattttaagtttagtgtttattttattatattttaagtaatattaaattaataatttaataataaaaagattataatttattaaatatgtttattgtaaaatatgtaattttattttatagatataaatattttttaaaatttttagaagaatgaggtaggatgtatatagatgtggaaagtatatatatttgtatttttttatagttggtaaatttatttagaggtgtgttttaggaaatagaattgatatattaaataaagattttttgtattgatttttgaaatataattatttttaatatatttaatggtaagaatttagtagtgtttaaaaattttgtatatatatatatatatacgtattttatatatatatatagattttatatatatgtaatttattaagtttaggttataagaggaaattggtaaaaatttattaattgaaatggagtttggttaagatatttatatttaattttttttttttgattttaaattagggagagtatatgttttgtgttttttggtaaaatatagatttatgtaataattagtatatttttttagattagagtaagtaatttttaataatgagtgtttgttagttttaattggtttttttacgtgggtggtgaaaaaatattttattatagttattaatttttttttttaaaagaattatgtgttttgagaagttttgttttattatagggtaatattttattttaaatatagtgtttatcgatgtttgtttatgaatgacgttaataaaaatgtttaaattttattaggaaaggagggtttagttgttagattttgggagatagagttagttgatttttgcgtttttaaaggttttgttatttaattaagtgattaattattaattttaaagtatttaagtttaataatataataaaagagagaataatgggtagtatttttaatattaattatggttatttttggtttagttgtttaggtttttttttagtagaatttataagtgtatagatataggtattttggaatattaaaggtatttttttttagtttgtaaatatagggaaaaagaagaaatttatatttgtaaatttatgtaaatttagggggattttttttaaatttcgtttttttgaaagtaggaaatataatttaaaattaattttgtttttatttattaaaagaattaaaattttgaattttgatataaattttaaatgattgttttgaattttatttcgttttttatttaatttttttataagaagattaaggattgtggatttggtgttggaggaagtaattgtttaattatattggaatttattggaattttttataatattattgcgggtagataatataattttaatatatttttttttttatttagagtttagaataagaagttagatttttggagattttttttttgatgtattgtttttaatatttttaagttataaattgggaatcgtttttattttagaatattaattgttgtttttattggtatttttttatttttatattatatttataatattttattttaggattttatgtgaatatttttaggatgggtttggcgaaattgttaagaagtgtttaaaataattaggttatagtttttagtagataaaaagaaaaagacgtggttgttagttatagaatttgaggtgatggaaaagatttttaaaatttagtttttttaatatgtagtaaaatgggaggatttaaaatgtagttttaagaagtatcgtttcgtttgtattaagtttttttaggtttttagtttagttattttttaaataggtgttgagtttttagttttcgttaggttttcgttaaggttttttattgaggtataggaattttagttatattcgtagtttttttatgtttgtttttatgaaattttattagttttgtcgaatggtagtatttgttattttaggcgaattttttatgatagtttggaacgaaattaatttgttaattgattaagaatgggttttagagtgatttgaatgtatttaaaaagttaataaatggaatacggtataaagttttatttttttgataaaaagtttgtttggagtaaattttaattttttttttgttttaaaataaaagtacgatgttttttttattatttttaagaagtaagtaaaaataaaataaaataaaataaaatttaaatagttttttaataagagtgtttagcgttgtttggatggaattcgggttagttttagaagtagtcggtttcgaatttcgggggcgaggttattcggttttttcggttaagttgggttttgtttttttcgtttcgtttttattggtttcggtgggtgggggtttcggttgcgtcggtcgtttgtgcggttgtattgtagtttttgagtttaggaagttatattcgtttcggttgggagtcgaagcgttaatttacgtggcggttggttaatttagtcgttgcggggagcgttcgttgcgggtttttttttggcgcgaggtgagcgagtgggggcgggttttagatttagtttttttgggcggggttggattattttcgtttgtttagtttttttttatttttttatttcggtacgtttttgtagttatatttgttgtcgttgggaaagggaaaagagtattttaaaacgagtttcgaaatttagatttaaatttcgaaacgaattttttcggttcgtttttggttgtttgaatgttatttgttttattttcgtttttttttttttttttttttttttacggttttttttttttttatttttttttttttttttttttttttttttttattgttcgttttttttttattttttcgttcgacgttcgttttgaagttgaggaagtttaagttttggattaggagttttttttttgtaatattttggggcggggttttatcgttgggtttaagtggttatgggttttgagagtacggtatgtgtattattttttttaaagacgtttagggtggcgcgtttagattttcgaaatttggttttatttcggttatgtgcgttcgtttattaagcggcgaattggatttagggcgtcgcgtgcgttttagtcgattcgcgagaaggtatttttgtattttgtatagattaagatttttttttagggttttttaaatttttagatgtacgtcgtagattgtggagtgtaaaatgaatgatttaagggaaaattagggttttttatttttgaatataaggttgtgaaagatgtacgtttggtttggggggtttgttttttttcgtttgtgcgggatttttttattagggggcgtttatattcgtcgtaaaatttttaatttttagatatttaggttttgtaagttttgtgagttgaattgggggtagattcgaaggagcgtatcgtttttttcgtttttttttttttgttgttttggagtacgggaaaggtagggattttatattagttatttatttgttagttgtgggggaggggacgtagaagttagagagagagaatagaggttgggagaggggaagggaggtagagaagatggagatagagggagatataaagatgaggaacgcgatttagagagattttgtcgcgggtgtgcgcgcggtaggataattttttaggcgtcgtgtagattttttttttttttcgtagtattttttagggatatgtaggatttgtcgagacgtagttggattggagagtaaatagtttaggttatgatattatttttttatttcgtttttttttgtttaatatttagatcgttttacgtttagtgatatagatcgcgggttagaataattcggatgttttaggtttgtacgtattagggatgtcgttttatagcgtttacgtttttgtaggacggtggggcgttttagtcgaggacgtttttcggggttttcggtatacgcgcgcgtcgttgtcgttagatttgttagtaaagttgtttaattagagcggagaattaggagagggtggggaatatgtaaggaaacggaggatttttgtagtttgggcgagaggattgatttagaggtttttgattcgggttttcgagttatttttgtttgtagtgcgttttgggtgtcggtttgtttgttgagatgggagcgatagattttattttattttttagggtgagaaaaattgttgtatatttttgtcgatttagaataggtttttttcgtttaggggttttttagattttcgcggggttttaataattttattttttattttttgttttttttttgttggttttttcgtatcgcgtgtaggataaaagaatttaggggcgtcgggagagaatcgtgatagtttttaagtcgttaaagagatacggcggggattttgtatttttttcggtcggatttttttttagattgtttgcggtttgaaggggttaggttcgcgtaaggttttaggttgtttgggcgtcgggtcgtattgttaggagttgttcgggagtggttttttaggaatattaggtattgattatatattaggggttgggaaattaggtggtttgtattaaggcggtttcggggatttgtttgtggtaagttttggtagtttttatttaaatttttgtttcgagcgtgttaagaataataataataaaaaaattaaagtgttaaaggttttttttttttttttagtttaagaatttattatttttttatgatttttttataatttattttttttttttttttaatttcgttagttattttatttttattttattttgggttttttttgtttgaattttttttaatattaaggtttttttgtatgtttttttttaaaagtttttatgaaagttatttgtattttttaagtgtttatatttttttaatttcgttttatagttttttgttttaattaaagttttttattaattgttttttttttttaagttcgcgggtttttttttataagttttttgtttttgttttttaaggggggaataaaagaaacgtgattattttggaaggcggtttattgtagtttggggggaaaatttattgtagcgttgcgcgattgggttcggcgttgtttaggcgggttatataggaagcgtggtggttcggggaaggatgcggagggtgcgggacggtgttggaagatgcgggaggatgcggggttggtcgaagattttggttttagtttttgtttataatatttaatgttttcggttgttgcgttcgtacgtttggagtttttttttagaaaggttcggggtagttcgtttgtaagtttaaatgcgggttgtgatatttattattattatattattgtatcgttagagtcgaggaggagatttagcgagaagaaggaggagggagaggaggagggtttatttataggttttaaaagcgtttcgtagttttagttatttttaagagtttaggtttggaaagtaggcggaggggcggaaaggtagtttttcgcgtttgcggtagggatcgtttgtttttttttttaggtatttttattttttggcgtttttttttgataagaagtattaatcggtttggggatagtagcgttttttatttagggatttatttagtaatatcgttttgttcgcggaaattattgtttttttattttttttttatttttattttttcgtttttcgtgtagttagttttgggttaggggaaaggagtttttaggtttttagggggtaggttagtaatagataattgagtacgattattttttttcgggagtatataaaattgtaaaattagtaaagaatttggttatagcgtgtttacgcgtttatagagtttgtttgttttattaaagggaagtgttaggtttaaggtttttgttaatttgaaagagatattgagaaaacgagatttttcggggatttagagggaaagtgtaagaattttttattgtatttttagggaattgtttaatggggagttcggttttaaaagattttggtaataaaaggttggataggaaatttttttaggtaaattttttgtcggatttaaagagaatattttttttttgttataaatttttttttatataagtttagattttgtttttttcgtttttttttttttttagtttttttaagtatttttgagtagaatatttgataatttttttgagtaatagggattttttggaagtattaattattttttatgtttttcggaaataagattataattttttatgcgtatatgcgattttttttttttagttaggtttattttattgtgtaaatagtattaatatatggaagagttttttgtattgtgttataaaagatttttaataggattttatagagaaaagggttaaatagttgatataaaggatttttgtttttttagaaaagagggattttggattttttttttttttgaagttaagtatgagtttatataataggaataaaataaatttaaggtgtatattagtataatattagggatattagaatggatggtaaatttttttttttatataaatatgaaagtatttttataatttttttttttgaagtttttatttagaaaattatattaaatataggattttaaaatagtagtgattaaagatgaaagttaatttttttttttaatttttttgattagtttggtttaaatttatgttttaaaatttttagtaatttagatttttgtatatgcgtatttataagattttttttatattttgtaatttgtaggtatttagtatggttattgattttaagtgataaataggtagaagatttgttaggataattttagtttttattatgtgtattttttattttttttgttatttattagttttttgtagtaatataattgttagttatattatttggaaattaatgtgtttttgtagtgaattatttatttttagtaaatttattgtattattattttaaatattgaaatttgattttattagatgtttagaatgatagttatagagtagaattagattttaatttttatgtataatatgtaaataaattaaggtgtagaaagttattgttttaaagttatataattaatagtttagtggtttttttagtgttaattatagtaattttagatttaagattgtttgatttaggaatggagagaaataaaataaaatgaatgtttattgaaatatatattttagatattaagatagatttttttgtgaaatattttaagatgtggatttgtatttttatttttaaatttgagtaaatttagttgagttttaaagagtttaagtaatttgtttaaggttattttgtaagtgatagatttgttagtttgaaaagtttattattttttatttttttgtttttttatgatatagttaagtaaaattttttaataaaggagaattagattagaaataagtaattaatagtagattaatgtttatttttagggaaatgttaatagttaatatttattataaataatgttatttgtatataatggaatatgattgaaagtgatgggttagatattttttatattttgagatgtttttatttatgttgttaaatttgattttttaattttttaaaatttttagttttttttaatgttaatagattttataatatttgattaaatatttttataggataaaggtatttttttagggttgatttaaggaattagaatatgtataatgttgaaaagttttaaattgtttgtttttttttttttttgatttgtaatattattatttagaaaattaaatatttttttaggttattagataattaaaatgaaattatattttatggatattttttttttatttttagggtagatttttttttttagttgtttaaaatggagaatggataaaaaagaaaaaggaaaatatattagttatatttagaatagagtttatagttgtattattatttttatgtaattgtttttaatgatttttttttattaagagaaagaaaatgagagagtatttatttttgattttttaatgtttgataaaattattagaagtttttgaatgggaaaatatatattttttaggttttataattaaaattgtatttatttgtttattatatttaagtatgaattaaatagtaattaaaatattattttgtgagtttttttttaaattatatttttgtattggggatattttttgtgaaaattttaagattttaggtataaataaagtaagatttttatttataatgtttgtgtttaaaagaaattataagttagaagttatgtgttttgtttttttgttttgattttgtttttgggaatttggttgagtttaggggtagtaagttaatgatttggagaggaaaggtgtagatggtagatgtgtttttagggaattttattatttttatttaaatttttttttgaggttttttaggattatattttagatttttttttttttattgattaggtgaagtgtttttagatatggtattatttattgttgttttagggatgataagattttagttttatttaaatttagaaagagtttagttttaattttttgatttgattggttttaggtataattaagtaaattatttttattggatgatatagtaatgttatagattaaaaatgtatttttaatttttaaagattttggaaaaaggaagtttattttttaagattgtgttataattttttttttaaataaaatattgtaaattagggatagatattttatttagtattttgaattttttttggttttttaggaaaggtagaaatataaggtttttattgttttttttttatttttaaaaaagaaattttgtaaaaggtaaagtgatggtggtaattttattgtgttttaattcgaagtatataaattgttttgataaattaaatatagataaatttttttagaaagttataaaatattagattttttttagatattagatattgagtttttgttttttaatttttaaattaaaatgttatagtaaaatatttgttttaataaattttttttttttttgtgttgtaaatgttttgtttatggttgagtagatttttttagaatttaattgaaagattatttatattacgatagaattatgtaagttaaagttaagttttaatatggagtgatgggagaggtcgggttgtcgagaggagatgattttattagtgagaagagaggttttttgagtcggtttttaaggtagttaaatggtttagtatatttgtatttattttgggaggttgtttggagtagagtattaaaaacgttattttttttataaagaaaaagatgaaggtataaagaatatagtttaattaaattgaattaaagattgtattatttttattttttttttagttatttttttaaagttttttttttttttttttatagtttgaaaaatataggttatttttataaagtatttgtttgattgaagtaagataaattgaagagtttggtttttgaatataaggaagcggtagagattttagaattaatgaggtagggcggaatataatgtagaaggttttttaagaggtaaaatttttgtagttgttgtttatttttagtgattattcgtttttatttatttaattagattatagtgggatcgagataaggagtataatgaaagttgttgtattgatggtgtaaaaagatatatggtattattaatgtttttgtggtgagtaaaggtagaacgtaagatagaaaataaggaaatttttgcgttgtaagaaaagtgtttagtatgggtattaatcggtatgtagaagtagtaagtatatattttatttttattttattgataaaaagaattgtaggattaatgtttgtttttattaaaatatgagaaattatattttaattttataaattaaaggttaaatatttgttgtaataattttaaaaaaaagagaagatttgtaagatttagtaaatatttattataaatagattgtttttaattttttatatttttttttaatttaataaaagtttattgagtagtttttatgtgtattgttttagatagtaggtattatttaaaaaagtaataattattttttatttttaaggagtttataatgtttttagaaagaaattaatttattggagtagttaaagttataattgatttataaaatgattagtgaatttagaggaaaattatatataaatatttttgtttttattggttggtttagttagatattattttaaaaaata

SEQ ID NO: 175 - DNA, 6090 bp, Artificial Sequence
  chemically treated genomic DNA (Homo sapiens)
tagagatggaatgtttaaattaggataatttagggaggtgtgggagaggtgtagggggattataagggatggagtaggaatttaaggtagtaatagtagagttggtattaattttaggtttaaaaagataaaggagagagagtggttattaaaatttagaaagagaaaattcggtaaaagacgggatttggtgaggagtagtaatttgtgtttggttgtggattgtggtaattttgtagggaggagagtagaggaatgattattttggttttatttttttttttttttttttattttatgttaggtgttttattggttaaatttattagtaattagaggataaggaatgtattaaaataattttacggtttagagagtagattagatgtagagtgataaatggattatatttagtataatcgtaggtttatttgttgattcgttttttttattagattgagttatttgaggatagagaatgttttttttatatttgtatttttaatatttggtggatattagatatttaagaaatgtttatggacgggattagagaagatggtaaattgggtattagatggaggtttgtgttttttgagtttgtcgtatgttttttggcgaatttaaggtaaaatgagaaatagaatgagttttgtatttttgtttggtaaaagaaaatatgatttggtgagaagaaatgaatatttttagtatttagtgttgggaggaattggaattagttatgtgattgtttttattagaggtttttaattgcgtaacggatagaatttttaatggtgaaattataatgtagaaatatttttttttttttttttttttttttttttgagacggagttttgttttgttatttaggttggagtgtagtggtattatttcggtttattgtaagtttcgtttttcgggtttattttatttttttgttttagttttttaagtagttgggattataggtatttgttattatatttggttaattttttgtatttttagtagaaatggggttttatcgtgttagttaggatgtttttgattttttgatttcgtgatttgttcgtttcggttttttaaagtgggaaatatttttaaaaatattagtttttgataaaattaaagttatgttataaaaaagtaattaaaaggtggaaatgagataatatggtttattttgagttgagaatattttgttagaaaatgattgttttagattttaaatttgattttttatataaatttttagtgtaattttttttgtattatttttttttttattagttaaaagatggaaaggataaattgaggaatttacgttggaggagtatggatttattagatggtagaaatttgggtttttgaatgattattgtggagttgatttttgtttatgttttgtaaatttttgtgttgagagtaagtaatatatttttaatgtgttaaatttttgggatttgttgggttttatagtaatggttattttattttaatacgattgtaaaataatgttttaaaatttatagtcgggtttgtttaaaatattatcgttattattattataatttatagtttatattataattatttttatagaagttttttttaattggtattttataatttgtggttttttatattgttgttttttatgtgtgagatgtttttttgagttttttttgttagggatatgatagaaaataaaatatttaatattttggtgtattttataatgtataaagttttgttttatgtattatttttttagatttttttaataaatttaaggaatatgtaagggtttataattatttttattttataggtgatgaaattgagacgtttatatgtaaagtggaaataattatttatttatttatttatttattaaataaaaatttcgttaatttatttaaagattaattgagagaattattttatttgtttggaatttggtatgtgttaagagaaaagtttttttaatttttttttttaagaagataatttattgttatataataaattattttgaaataatgatttaaaatattaaaagttattgattttgtttatagaatttgaattggaagatataaataattgggagtgagggtggggttggatagttggtttttttgggtatttttcgttttttttgtggttttgttatatgtttttatatggtagttttagggtaattatgatagttgaaggttttagagtgggtggagggggagagggagggagggaaagagagagagagagagagagagagaaagagaagtaagtaggtagaagttttaatgttttatgatttaattttggaaataaattatattgtgttattgttattatttttttttagaagtaagtagatagggttggtgaatatttattgagaggggaattagattttattttttgattgggggagtgttaaagaatttgtgaatatgtttttaaatgattatattttttttttttaaaatgtttgtttaaattggtgtatataaaaagttcgggggttagtgatttatttaaggttattaagttgttaaatggttttattaatattagatttaattttgtgattttaaattttatgtttttttttattattttagataattttcggtgaatattattgtttattagggtagttaagatattttagttgttaaatagatttagtttttttaattgtttcggataatatattttttattttgtagaaaataaatattatttatatggtagttatttataaatattttttaagtttattttaaatatttgtgttttaaatttttttttttaatagatgtatttatttgtatttttttagatgaattattttttttttgttgttgttgttatttttgattgtattttttattttttaagatttttttgtattattaagtttattgtttaagttaatattattttttaatttggggatttttttttgatttttgtgtgttttttttgtgggttattaatgtaatgttatttaagattaggatttggttgggcgtagtggtttacgtttgtaattttagtattgtgggaggtcgagtcgggaggattatttgaggttaggagtttaagattagtttgattaatatggtgaaattacgtttttattaaaaatataaaattagtcgggtatagttatatgtttgtaattttagttattgggtagtttgaggtaggagaatcgtttgaattcgggaggcggaggcggagtttgtagtgagttaagattttataattgtattttagtttgggttataagagcgaaaattcgttttaaaaaaaaaaaaaagattaggatttgatataaggtttgaggggtatttttttgttttgttttgttttgtttttaagaggttaaaatttttatagttgaaaatttttgttgaattatagagatttgaattaatttagtttagaaagtttggggatttgaataacggtatggatcggaaatttttttatttgttagtttttattattttaggtagtaaaatagatttttttttaggagttttttatcgtttggggttttttagtagtgggatgtggggaattaattttttttcgtttttatttaaatattaggtgggagtaaggggtgggaagtagagaaagtggatagaggtttttagtggatatgggatttttgtgtagattagtatagtttttagaaattttatgtaagtaatataggtattgttatattttttagtggttattttttaaaaagtaaataggtgaggtcgggcgcggtcgttacgtttgtaattttagtattttgggaggtttaggcgggcggattacgaggttaagagatggagattattttggtcgatacggtgaaatttcgtttttattaaaaatataaaaattagttgggtatggtgacgcgcgattgtagttttagttattggggaggtcgaggtaggagaattatttgaattttggaggtggaggttgttacgttttattatattttagtttggcgatagagtgagatttcgttttaaaaaaaagaaagtaaataggtgaaattaattttaataatatattttgtttaatttaacgtatttaaaatattattatttgaaagtgtaatgaatataaaaatatttatgagatattttttatttttatatttatattgttttggattttaatgtgtattttatatttatagtataattaatttgggattagttatattttagtttaataatagttaatagtatatgggatagcgtaaataaattttgcgtttttgttgtttttttgggtttcggagattttaattttttttttagattgtaaatttttttgtttttaagtttcggttttaatattagttcggtagaggaatttagtttaatgaggtacgttttttttttgttattttttattttattaatttgtttcgtggtaaacgtaggattgattttttaaaattattttattaattagtttatatatttattatttatttgttttattagaatgtaggttttcggaaggtagggatttaaaaaaatttgttttgttttatgtgatttttttatattaagtatcgtgttcggtataagttgggattttagtatatatttcgggacggaagaatcgtgtttttttagaatttagttagagggtagtttagtaatgtgttataggtggggcgttcgcgtttcgggcggacgtattggtttttcggtcggcgtgggtgtggggcgagtgggtgtgtgcggggtgtgcgcggtagagcgcgttagcgagttcggagcgcggagttgggaggagtagcgagcgtcgcgtagaattcgtagcgtcggtttggtagggtagttcggaggtgggtgggtcgcgtcgttagttcgtttgtagggtttttattggtcgtttgtcggtcgtttttcgtttaaaaggcggtaaggagtcgagaggttgtttcggagtgtgaggaggatagtcggatcgagttaacgtcggggattttgtttttttcgcggaggggattcggtaattcgtagcggtagggtttggggtcggcgtttgggagggatttgcgttttttatttattttttagttgtgttttcgtcgcgtttcggttagttttcggcgttggcgtttatggtcggttttcgatagcgtttcggagggatcgggggagtttttaggcgttcgggtgagtagttaggcgcggtttttcggttttttcgattttcggcgttagtttttgtttttttagttagggcgcggtggggtttgttcgggtagtgtttcgagtaattgggaaggttaaggcggagggaaatttggtttcggggagaagtgcgatcgtagtcgggaggtttttttagtttcgcgggtcgggtgagaataggtggcgtcggttcgattaggcgttttgtgtcggggcgcgaggatttggagcgaattgttgcgtttcggtgggtcgttttttttttttttttgttttttcgggcggtcgtacgtcgggtcggtcgggtaacggagagggagtcgttaggaatgtggttttggggattgtttcgttcggggaaggggagagggtggttacggtgttaggagaggcgcgggagtcgagaggtggcgcgggggtgttatcgttgtcgtaggttggagagagattgtttttagtgaggcgcgtatcgtttgggcgagggttttattttttcgcggcgtttttggaggtgggaaagttgggtgggtatgtgtgtagagaaaggggaggcggggaggttagttattttcggagtcggttttgattttaatagatcgtttagcgtttggggacgtcgatttcggggtgtcgtggtgttcggttttacgcgcgcgcggggttgaggggtcgggggcgtttttggtcgtttagttttaataaagggtgtttttttttatttcgcgaggaggggtagtttcggagattcggtttttagcgagcggggttttagcgtcggggaggtttatttttttttggggttgttattttattattattattgttttttttttttttttaaaagg

SEQ ID NO: 176 - DNA, 6090 bp, Artificial Sequence
  chemically treated genomic DNA (Homo sapiens)
ttttttgaagaaaaaaaaaaggtaataataatagtaaaatggtaattttaaaaggaagtagattttttcggcgttaagatttcgttcgttgaagatcgggttttcggagttgttttttttcgcggggtggagaggagtattttttgttaaagttgggcggttagggacgttttcgattttttagtttcgcgcgcgcgtggggtcgggtattacggtatttcgaggtcggcgtttttaaacgttgggcggtttgttgggattagaatcggtttcggaagtgattggttttttcgttttttttttttttgtatatatgtttatttagtttttttatttttagggacgtcgcggaagaatgaagttttcgtttagacggtacgcgttttattgggagtaatttttttttagtttgcggtaacggtggtattttcgcgttatttttcggttttcgcgttttttttaatatcgtggttatttttttttttttttcgagcgaggtagtttttagagttatatttttggcgatttttttttcgttattcggtcgattcggcgtgcggtcgttcgggggagtaagggagggaagggagcggtttatcgaggcgtagtagttcgttttagattttcgcgtttcgatataaagcgtttggtcgggtcggcgttatttgtttttattcggttcgcggggttggggaagtttttcggttgcgatcgtattttttttcgaagttaagttttttttcgttttggtttttttagttgttcgaggtattgttcggataaattttatcgcgttttggttgggaaagtaaaagttggcgtcgggggtcggggggatcggggagtcgcgtttggttatttattcgggcgtttgggagttttttcggttttttcggagcgttgtcggaggtcgattataggcgttagcgtcggagattagtcggggcgcggcgggaatatagttagggagtgagtggggggcgtagattttttttaggcgtcggttttagattttgtcgttgcgagttgtcgagtttttttcgcggagggaataaagttttcggcgttggttcggttcggttgttttttttatatttcgaagtagtttttcggttttttgtcgttttttgggcggagggcggtcggtaggcggttaatggggattttgtaagcgggttggcggcgcggtttatttattttcgagttgttttgttaggtcggcgttgcgggttttgcgcggcgttcgttgttttttttagtttcgcgtttcgggttcgttggcgcgttttatcgcgtatatttcgtatatatttattcgttttatatttacgtcggtcggggagttagtgcgttcgttcggaacgcgggcgttttatttgtgatatattgttaagttgttttttgattgggttttagggaaatacggttttttcgtttcgagatgtgtattgggattttagtttgtgtcgggtacggtgtttggtatgggaaaattatatagaataaaatagatttttttaaatttttgtttttcggaaatttgtattttggtgggatagatagataataaatatgtaagttaattaataaggtaattttggaggattagttttacgtttattacgaaataggttaatggaatagagaatggtaggaagggagcgtattttattagattgggtttttttgtcggattggtgttggagtcgaggtttgaaggtaagaaggtttgtaatttgaagaaagggttgaggttttcgagatttaaagaagtaatagagacgtagagtttatttgcgttattttatatgttattggttattgttgagttgaaatgtagttagttttaaattaattgtgttgtaagtgtaaaatatatattagagtttaagatagtatggatatgagaatgaaaaatattttatgaatatttttatatttattatatttttaaatgatagtattttggatacgttgggttaaataaaatatattattaaaattaattttatttgtttatttttttttttttgagacggagttttattttgtcgttaggttggagtgtagtggagcgtggtaatttttatttttagggtttaagtgatttttttgtttcggtttttttagtagttaggattatagtcgcgcgttattatgtttagttaatttttgtatttttagtagagacggggttttatcgtgtcgattaggatggtttttattttttgatttcgtgattcgttcgtttgggttttttaaagtgttgggattataggcgtgacgatcgcgttcggttttatttgtttattttttaaaaggtggttattagaaaatataatagtatttatgttgtttgtatgagatttttgaggattgtgttggtttatataaagattttatatttattggagatttttatttattttttttattttttattttttgtttttatttaatgtttgggtggagacgaagaagggttgattttttatattttattgttggagaattttaaacggtgaaaagtttttaaagggaaatttattttattgtttagaatgatgaaaattgatagatgaagagattttcgatttatatcgttgtttaaatttttaggttttttaaattgagttggtttaaatttttgtggtttaatagaaatttttaattgtgaagattttggttttttgaaaataaggtaaaataaaataaaagaatattttttaggttttatgttaaattttagttttttttttttttttgagacgggttttcgtttttgtggtttagattggagtgtagttgtgaaattttggtttattgtaaatttcgttttcgtttttcgggtttaagcgatttttttgttttaggttatttagtagttgggattataggtatgtgattatgttcggttaattttgtatttttagtagagacgtggttttattatgttggttaggttggttttgaatttttgattttaggtgattttttcggttcggttttttatagtgttgggattataggcgtgagttattgcgtttagttaaattttagttttaaataatattgtattaatgatttataggaagggtatataggaattaaggggaagtttttaaattgggagatggtattagtttaagtagtgggtttgataatataaaagggttttgagaggtgagaaatatagttaaaaataataataataataaaaaaagagtgatttatttgggaaaatgtaaatgaatatatttgttgggagaaaaaatttaaaatatagatgtttgggataaatttggaaggtgtttatggatgattgttatatgggtaatatttattttttgtaaaataaaaaatatattgttcgaggtaattaaaaggattgaatttatttggtagttagaatgttttaattattttaatggataatgatgtttatcggagattatttggagtagtgaaaaagagtatgaaatttggagttataaaattagatttagtattggtggaattatttaatagtttaataattttggatgagttattaattttcgagttttttgtgtatattaatttagataagtattttagaaaggggaaatgtggttatttaaaaatatatttataaattttttgatatttttttaattaagaggtggagtttaattttttttttaataaatatttattaattttatttgtttgtttttaagaaaaggtagtggtagtggtatagtgtaatttatttttaaggttaggttataaggtattagagtttttgtttgtttgtttttttttttttttttttttttttttttttttttttttttttttttttttttttttatttattttaaagtttttagttgttatgattattttagggttgttatgtagagatatgtgataaaattatagaaagaacgagagatgtttagagaagttagttgtttagttttatttttatttttagttgtttatattttttagtttaagttttgtgagtaaaattaatgatttttaatgttttaagttattattttagagtggtttgttatgtagtaatagattatttttttaaaaagaaaaattaagaaaattttttttttaatatatattaggttttagatagatgaaataatttttttaattaatttttaaataaattagcggggtttttatttaataaataaataaataaataagtggttatttttattttatatgtaaacgttttagttttattatttgtgaaatgaagatgattatagatttttatatattttttgggtttgttgggagaatttaaagagataatgtatgaaataggattttgtatattataaaatatattagaatgttggatattttattttttattatgtttttagtaaaaaggatttagagaggtattttatatatagaaggtaataatataagaagttataaattatgagatgttagttgagaaggatttttataaaaataattatgatatggattatggattataataatgatggcgataatattttaaataaattcgattgtagattttagaatattattttatagtcgtattagggtaaaataattattgttataagatttaataaattttagaggtttaatatattaaaaatgtgttatttgtttttagtataaaggtttgtagggtataagtagagattagttttatagtagttatttagaaatttaggtttttgttatttaatgaatttatgtttttttagcgtaagttttttagtttattttttttattttttggttgatgagagaagagataatatagggaggattgtattgaaggtttatgtaggaggttagatttgaagtttgagataattattttttggtaagatgtttttagtttaaagtggattatattattttatttttattttttggttgtttttttgtaatatggttttggttttattaagggttaatatttttaagaatgttttttattttgggaggtcgaggcgggtagattacgaggttaggagattaagagtattttagttaatacggtgaaattttatttttattaaaaatataaaaaattagttaggtgtggtggtaggtgtttgtagttttagttatttgggaggttgaggtaggagaatggggtgaattcgggaggcggagtttgtagtgagtcgagatggtgttattgtattttagtttgggtgatagagtaagatttcgttttaaaaaaaaaaaaaaaaaaaaaaaaaagaatgtttttgtattgtggttttattattaaagattttgttcgttacgtagttgagagtttttgatagaggtagttatatgattgattttagttttttttagtattgagtgttaaaagtatttatttttttttattaaattatatttttttttattagataaaagtatagagtttattttgttttttattttgttttggattcgttagaaagtatgcggtaagtttagaaagtataaatttttatttaatgtttaatttattattttttttgatttcgtttataagtattttttgagtatttagtgtttattaaatgttagggatatagatataagagaaatattttttgtttttaggtaatttagtttgatgagggagacggattaataaatagatttgcgattgtgttaaatataatttatttgttattttatatttaatttattttttgagtcgtaagattattttaatgtattttttgttttttggttgttggtaggtttagttaatggggtatttgatatgagatgaaggagaaggaaggagagtgaagttaagatagttatttttttgtttttttttttgtaagattgttatagtttatagttaaatataggttgttgttttttattaggtttcgttttttatcgggttttttttttttgggttttggtaattatttttttttttttgtttttttgagtttagggttggtgttagttttgttattattattttgggtttttgttttattttttatggtttttttgtattttttttatatttttttgaattgttttaatttgagtattttatttttg

SEQ ID NO: 177 - DNA, 6274 bp, Artificial Sequence
  chemically treated genomic DNA (Homo sapiens)
ggattatttgagtttgggaagttgaggttgtagtgagttaaggttacgttattgtattttggattgggtaatagagttagattttgttttaaaaaaaagaaaaattttatggttttgtttatattatttatttgattttatatgttgtttattttttttattaaaatttttagtttattaattatagtttttttataattaatatttcgatgtgataatgttttagtttaattattgtggttataatagaatgttataaattgggtgatttataaataaaagaagttgatttaggttgatttagaggttggggagtttaagagtttggtgttagtatttgatgagtgtttttttgttttattataatatgggagagggtattacgtgtgaagagagtttatttttataatatagttatttttataagaattaatttatcgttatgagagttatgtgaatttatttatgaggatagcgggttaagtttttaatatatggatttttcggggatatatttaaattatagtagttagttgtaacgttcgtgttatgttttattttggttttgatgtttgtgtagtttttttaaattgcgtttttgttttttagtgtgttttgtaatgtggaaatgatatattgggtaagaggagttgtagtaaagaggtttttagtgacgtagtgataagttgtggggagagggagtgttgtatagttttgtcgtatgttatagttttttagtgagtttgtgtttttggattgtgaattttatgtttgttttttagtttttttagttttttagatggtatagaattgttggaggggggtggagttgtatattttttttgttttgggtaggttattttttgataaaatattaggttaggtttttggtgaaataattttttttgagggtagattttttattaataatagaatgttttaatttattttaaaatggttttttttttttttttattgttagaagtataatgagattttttttttaatattcgtggtaaggatttagtagagttttaggaggtaatatttttaagtgttttatattattttgtattatgattgggttttgttggagtttttaatttgtagaattgtttatattgagtttttcgtaattttttaattatagggtaaatttttttagtcggtattgggtttttggaggtttttgtttgttggtttttttttttggaggttgtgtttttgtgtttgtttgtttttttaatttggggggtagtggtttgtttaatgattttaattttttgaaagagttaagaagaggtgttaatttttcggtttgtttagttttttatttgttgttagaatggagcgttaatagtgttttttatagtgatatgtaatttttaattttagagatgatgaagtatattaatgataaaggagaaatgttttagtagttttttgttagtatattattttttgaaaaagttgttttttttatattttgtaagagatgggttttaatttagagtttaaggtaaatgattttttttaaggagaaggaataaatagttttagaaattatgaaagtttgtttttaggagtgtttttgaattttagtaggggttatatttattttgtagaaataggtgaggtatgtttttggtataaaattttaatggtatagaaggataaattgaaaaataagtttttttttaaatttttgatttcgagttatttagtttttttttttagaggtaaagttgttattagatttttgtatttttttaatatatatttttagaagagttgttaagtgaatatatgtttaagtgaaaatttattttagaagtgtatttttttaaggaattttagggttggaaggaatttgtgttagtttttaatttataatttttattagtatttattgtttttgtataaaaattttttttaaaaaagttttttttattttgatatagtttattttatttttatttagttttaataatttataaaatatatttttgaaagtttaaaatttgttattatgttttttttttttaattaatttttattttgatttttaagttagagaaaataggtggttaaatgttttttgtttaagatggaatttagaatatttgaagattttagatttttattttgttaaataacgtgttttttttttttttttatagagtatttggttttaggaaatttagagttatattttttatagataagattaaatttttatttaatatatttagaaattttttttaagaggataattatttattagaggaaaaaagttttttatgtatagttggtaaagggatggaattatttgtgttattaaaattgatagacgtttatgagatttattaagggaaatattagagttttagtatatatttgttaatatagtatatatgaaggttttatttataatttttttggttaagtagaaattttggtattatttattttaataaatttttaagatattatgaaatagaattttaggttttgatattattatttgttttaggttttgaagcgttgttggataagaggggtaaaatacggttttgttttggatttaaagttggttttttatattagtaagtatattttggtattttggttatttttttcggttatagtattatattgttataaaaggtagatataagtattaattagtttataggttattagataagtttagtttgattaatgtttaatatagtaattgggttattattgttatttttgtggtggtggtatatatatttagtttttgttcgggttatggtttaggattattttttatagaggttgtgagttagagttttaattgtgtagggttttaattatgttaggttatttattttttttaagaggattttattagtgtttgttcggttatatagttttttatttattaagtaatatagttattagtatattttaggtattagttaaggattataaaattaacgtgaatgttagtttttgtattaaaagtttaaaggagaaatttaaattttatatagatgttttatgaagatgtttagtaaatttatttttttttgttttttggaatttattttagtattgtgttatgtgtgtgtttagtaattttttataaaaagttttgttttttgtgatgttattagattatattgaagaatatataagtcgtattatgaaggttgttgttttatatagttttaacgtagtgagaattgatgtttttatatgttgtttttttgggtatttaaagaaatttttgtatagttttataaattagttgtagtttaaattgatttgtgttgtgatttgtatatataggttatatttttttgatagaaaatatagtttaaaattaaatttgtagtttttgttaagtgaatgtataggattttattgtatttaggttttttattgtaagatttatttttgtttttattttatgttttattgttgtgttttttatttgtttttttttagttttgttttttgtgtttttacggattgtttttagtttaggtgtgtaggaagtatatatatgtttgtagagtttttatggtttttgtatttagggtatgattttaacgtatagtggttgtattgatttgttaaaataaaggaatagattattttttttaatttatagggaagttttaggttgtgcgggtagtgagtagatttgtgtttgtttgcgtttgttttggtgaaaaattttatcgtttaggttgtagggtgcgagatttaggtataaatattttgttggatgaggaggaaagatgtaaggttgtttttttttagagatagtaaagggtaggtttgtagttttatttattttaggattgtgatttttgatagagtcgagagattagggttgttgaattaggtttgaaggttttagtgaatttcgtgaagagaggaggggtttggttgtaatatggatttagaggatatttttattgtaggagaaggaatagtggggatggggtggatttgttaaaggaatatagtttaagtttttgtagtttaaaaaagtttagttttttttggttaaagttttcgcgagtttttttggtattttttttgcgggagttataggggtagtgggatatttagtttttttaaaagtatttttacggttgtttgtgttaagtttttattttaagagttttatttttgcgaagtaatgtgttttatatattggttttaaagtatttatggttggttgtaataaatattaaggaggtttgtttttgtattcggagttgggtgtttttattttagatgatttcgagggtgtttgataagatttgaaggattttcggattttagagtattatttcggacgtttggtatttttgtcgcgcgggtacggcgatttttttagttgttaggttagtttttgattttcgagagggtttcgtagtgttgtaggggaggtggggattcgaataaaggagtagttttttcgtcggtgttattattcgacgttggttttaaggttcggttagtttgtttaaagttggtataagtttgttttgtaaaataaaagaagggaaagggggaaggggattttggtatagatttggttcgatttggatataggttgggtttgtaagttcgcggggatcgggtttagaggggtagtgttgggaacgtttttttcggaaattaattttttagggtattcgttttttttttatgcgtcgttttattttcgtcggagattaggtttcgcgggggttatcgttgtttatcgttttcggcggtcgttggttttgggttttcgttgttggtttttttttttttttttcgtatttttttttttttttgtttttttcgatttttttttcgtcgtttggtttttttttttttcgttttgttttttcgcgtttcggttcgcgcgagttagacgttcgggtagttttcggcgtagcgcggtcgtagtagttttcgtttttcgtacggtgtgagcgttcgacgcggtcgaggcggtcggagtttcgagttagtttcggcggtcgtcgtcgtttagatcggacgataggttatttcgtcggcgttcgttcgagttttcgtttcgtcgttaacgttataattatcgcgtacggttttttgatttcgtttagtattgatcgggagagtcggagcgagtttttcggggagtagcgatgcgatttttcgggacggtcggggtagcgtttttggcgttgttggttgcgttttgttcggcgagtcgggttttggaggaaaagaaaggtaagggcgtgtttcgtcggttttcgcgtcgttttcggatcgcgtttcggatttcgtagttcgtttaatcgcgtatcggcgtatcggttcggcgttcgcgttttcgttcgtttttttttgtttttttgagattagttgcgtcgtcgatcgggatcgcgggaggaacgggacgtttcgtttttcggtcgggagagtttggggcgggcggaggaggagacgcgtgggatatcgggttgtaggttaggcggggaacggtcgtcgggattttcggcgtttcgaatcgtttttaattttttttttttatttttttcgtttagttgcgtaggatcggcgttagtgggcgaaagtcgggtgttggtgggcgtttggggtcggggtttcgtacgtgcgtttcgcgttgtttttttagggcgcgacggggttttggcgcgtattcgaggggcgggcgttgtttattcgtcgagattgtattgtttagggaagttgaggaaggaatttaaaaatatagttttttttcggatttcgcgggataggcggttttttgagaggattttttcgttttcgtttttcgcgtaggttttaaattgaagtcggcgttcgttagtttggtttcggtttttttttaggttttcgcgattttcgttttttagtgtggagtcgtagtttcgatttgggagttgggagaattcgtttattattatttgcggttttcggggaggggtggtgttggcggcggttagttttttcgttggtaaaaggtaggtggggttcgattcgttttttgggcgtagatttcggtcgttcgtttcgttcggtgcgttttcgttttgtttatttaagagtgttttttatttttcggggattttagtttttttttgggcgttcgcgtcgaaagttttaggttttttttcgatggtcgtttcgcggagacgttcgggtttgttttatttgtagtttttcggtcgcgtttgggtttcgcggtggagcgggacgcggttgt

SEQ ID NO: 178 - DNA, 6274 bp, Artificial Sequence
  chemically treated genomic DNA (Homo sapiens)
atagtcgcgtttcgttttatcgcgaagtttaggcgcgatcgaagggttgtaggtggagtagattcggacgttttcgcgaggcggttatcgaaggagagtttggggttttcggcgcgggcgtttaggagggagttggggttttcgggaggtggggggtatttttggataggtaagacgagggcgtatcgggcgaggcgagcggtcggggtttgcgtttaaggggcgggtcggattttatttgttttttgttaacgaggaaattaatcgtcgttagtattattttttttcgggagtcgtaggtggtggtagacgagtttttttagtttttaggtcgaggttgcgattttatattggggaacgaggatcgcggggatttggagaggggtcggggttaggttggcgggcgtcggttttagtttgagatttgcgcggagggcggaggcggggaggtttttttagaaagtcgtttgtttcgcggggttcgaggggaggttgtatttttgggttttttttttagtttttttaaatagtgtagtttcggcgggtgggtagcgttcgtttttcgggtgcgcgttaggatttcgtcgcgttttgggaagatagcgcggggcgtacgtgcgggatttcggttttaggcgtttattagtattcggttttcgtttattgacgtcgattttgcgtagttgggcggggaaagtgagggaagaaagttgggagcggttcggggcgtcggaggtttcggcggtcgtttttcgtttggtttgtagttcggtgttttacgcgttttttttttcgttcgttttagattttttcggtcgaagaacgaaacgtttcgtttttttcgcggtttcggtcggcggcgtagttgattttaaggaaataggaaaggacgggcgggggcgcgggcgtcgagtcggtgcgtcggtgcgcggttgggcgggttgcggggttcggggcgcgattcgggggcggcgcgggagtcggcgagatacgtttttatttttttttttttttagagttcgattcgtcgggtagagcgtagttagtagcgttaggagcgttgtttcggtcgtttcggagggtcgtatcgttgtttttcgaagagttcgtttcggttttttcgattaatattggacggagttagggggtcgtgcgcggtggttgtggcgttggcggcgaggcggggattcgggcggacgtcgacgaggtggtttgtcgttcggtttgggcggcggcggtcgtcggggttagttcgggatttcggtcgtttcggtcgcgtcgggcgtttatatcgtgcggggggcggaggttgttgcggtcgcgttgcgtcgggggttgttcggacgtttagttcgcgcgggtcgaggcgcggggaggtagggcgggaggaggagggattaggcggcggaggagggatcgggaggagtagaggaggaggagaatgcgaggaggagggaggagaattagtagcggggatttaaggttagcggtcgtcggaggcggtggatagcggtggttttcgcgggatttagttttcggcgggagtggggcggcgtatgggaggggagcgggtgttttgaggagttaattttcgagaggggcgtttttagtattgtttttttggattcggttttcgcggatttgtaggtttagtttatgtttaggtcgagttaaatttgtgttagggtttttttttttttttttttttttttgttttataaagtaaatttgtattagttttagatagattggtcgagttttagagttagcgtcggataatggtatcgacggggaaattgtttttttattcgggtttttattttttttgtagtattacgggattttttcggggattagaggttggtttggtagttgaggaggtcgtcgtgttcgcgcggtaggggtgttaggcgttcgaggtggtgttttaaagttcgagggttttttagattttgttaagtattttcgaaattatttgaaatgagggtatttaatttcgggtgtagagataggtttttttaatgtttattgtaattagttatgggtattttgaagttaatgtgtgaagtatattatttcgtaaaagtgaagtttttggaataaaggtttgatataaatagtcgtggaggtgtttttagagaggttaagtgttttattgtttttgtagttttcgtaggagaaatgttagggaaattcgcggaagttttggttaaaagaaattgagtttttttgggttgtaggaatttgagttatatttttttggtaagtttattttatttttattgtttttttttttgtagtaaaaatgttttttaggtttatgttatagttagattttttttttttttacgagatttattaggatttttaggtttggtttaataattttgatttttcggttttgttaaaaattataattttgaagtaagtgaagttatagatttgttttttgttgtttttgaaggggagtaattttatattttttttttttatttagtaaaatgtttgtgtttgggtttcgtattttgtagtttgaacggtggggttttttattagggtaagcgtagatagatataggtttgtttattgttcgtataatttggaatttttttgtgaattaggagaagtaatttgtttttttgttttaataaattagtatagttattgtgcgttgaagttatgttttgaatgtagaggttatgaaggttttgtaggtatgtgtgtgttttttgtatatttgggttgagagtagttcgtagaaatatagaaaataaaattagagaaaggtaaatgggaagtataatagtggaatataaaatgaagataggagtgagttttataataaaagatttgaatataataaagttttgtgtatttatttaataagggttgtaaatttggttttaaattatattttttgttaagggaatgtgatttgtgtgtataagttataatataaattaatttaagttataattgatttgtaagattgtataggaatttttttgagtgtttaaaaagatagtatgtaagaatattagtttttattacgttaggattatatgagataatagtttttatagtacggtttgtatattttttaatgtgatttgatagtattataagaaatagagttttttgtaaagaattattagatatatatatagtataatattgggatggattttagggaatagagaagaatgggtttgttgaatatttttatgggatatttatgtaaagtttgagttttttttttgagtttttgatataaaagttgatatttacgttgattttgtagtttttggttagtatttggagtgtgttgataattgtgttatttggtaagtaaaaaattgtatggtcgagtaggtattaatgaagtttttttaagagagataagtagtttggtatagttagggttttgtatagttagggttttagtttatagtttttgtggagggtggttttagattatggttcggatagaggttgggtgtgtgtgttattattataggaatgataatagtggtttagttgttgtgttaagtattggttagattaagtttatttgataatttgtgagttggttaatatttgtatttgttttttatagtaatgtgatgttgtggtcgggagaagtgattaggatattaaggtatatttgttagtatgagaggttaattttgaatttaaggtagagtcgtgttttattttttttgtttagtaacgttttaaaatttgagataaatggtgatgttaggatttaaaattttattttataatgttttggaaatttgttagggtgagtaatattaaaatttttgtttggttaaaaaaattatagataaagtttttatgtatgttatattagtaagtatgtattaagattttagtattttttttaataaattttataagcgtttgttaattttaataatatagatggttttatttttttgttagttgtatatgagaaattttttttttttgatgagtggttatttttttagaagaagtttttgagtatgttgaataagagtttagttttgtttataaggaatgtggttttgaattttttaaaattaaatgttttgtgaaaggggaggagaaatacgttatttggtagggtgaagatttgaggtttttaaatattttaagttttattttaggtaaaaggtatttgattatttgttttttttggtttagaggttaaagtaaagattgattaggaaaaaaaaatatagtggtagattttagatttttaaaaatatgttttataagttattggagttaagtaaaagtagaataagttatgttagagtggaaagggtttttttgagaaagatttttgtgtaagaataataagtattaatggaggttgtgaattaaggattgatataggttttttttaattttaaagttttttaagaaaatgtatttttaaaataggtttttatttaaatatgtgtttatttgatagtttttttaaggatatatgttaaggagatataagaatttggtaatagttttgtttttagggaggagaattaggtagttcggggttaggggtttagagggagatttgttttttaatttgtttttttgtattattgggattttgtattaggagtatgttttatttatttttgtaaggtaagtgtggtttttgttgaggtttagggatatttttgggggtaggtttttatggtttttgagattgtttattttttttttttgaaggaagttatttgttttgagttttgagttgagatttattttttgtagaatgtggaagaagtagtttttttaaggggtaatgtgttgatagaaaattgttgaagtattttttttttgttattagtatgttttattatttttagagttgagggttatatgttattataggaggtattattggcgttttattttagtaataagtagaaagttgagtaaatcgaaaaattaatatttttttttagtttttttagagaattgaggttattgggtaaattattgttttttaaattggagagataggtaaatatagaagtataatttttagaggaagaaattagtagatagaaatttttaaggatttagtgtcggttgggaaagtttgttttgtaattgagaaattgcgggaggtttagtgtgggtagttttgtaaattaagaattttagtagagtttagttatggtgtagggtagtatgagatatttgagagtgttattttttggagttttgttaggtttttattacgaatattagggggaaaattttattatgtttttggtagtggaaggagaagaggaattattttgaaataggttggaatattttattattaatagaaggtttgtttttaggagaaattattttattagaggtttaatttggtgttttattagagggtgatttatttagagtaagggaaatatataattttatttttttttaatagttttgtattatttaaggggttggggaagttgagaagtaagtatgaagtttatagtttagggatataggtttattggaagattgtgatatgcggtaggattgtgtaatattttttttttttatagtttgttattacgttattagaagtttttttattatagttttttttatttagtatattatttttatattgtaaggtatattaaaaggtaaagacgtagtttgaagagattgtataagtattagaattagaatgagatatgatacgaacgttataattaattgttgtggtttgaatgtgttttcgaaaagtttatatattggaaatttaattcgttgtttttatgaatgaatttatatggtttttatggcggtgggttaatttttgtgggagtggttatgttataagagtaagttttttttatacgtgatgtttttttttatgttatgatgaagtaagaagatatttattagatgttagtattaagtttttggattttttagtttttaaattagtttaaattagttttttttgtttataaattatttagtttgtggtattttgttataattatagtaattggattaagatattattatatcggagtattaattataaaaaaattatgattaataggttaggagttttaatggaaaaaataggtaatatgtaagattagatggataatgtaagtagagttatggaattttttttttttttgagatagggtttggttttgttgtttaatttagagtgtagtggcgtgattttggtttattgtaattttaattttttaggtttaggtgattt

SEQ ID NO: 179 - DNA, 3000 bp, Artificial Sequence
  chemically treated genomic DNA (Homo sapiens)
atatttaaattgtatatttggtttgtaatatattatatatttaaaagaattattatttttttgaatattattaatattaataatagtattatagtgattaagagtggatttaaataaaggttggtttgaaatttaggtttgttatttattagtaagtttttaaaaattttgagtttttagtttttttatatgtgaaatggagaaaataaatttgtaaaattaattaaatttgtttatttatatttttttttttagtgtatattaattggtatttttcgttaggttagaatgtgtttttaattatgttttaaattcgttttgtgttaattttattgttagaattttttttattttgagaattagaaaaggaaatattatgtttggtaatgtttatattttttaaaataaatttgtaggaaagaatatttagtaagtgatgagagtagtaacgattgtttttattattttaaatttataatattattttttttagagttttttaagtattgtagataattttttatttattaaaaaataaattgtaattataagtatttagggttgatattgtttttgaattagatagtgtttatattagttgtataagattaatttaaagtagaggatgaaattttttttttgaattttttttagaacgtaatttagtgaatatattaaaattaaattttttttgaatgggagtaatttttacggattaatttgtaattttttagattatatttaaggtaatgtagaggttgttgtattataggttttgtgattagagattattggatttgtttttggaaaagttatttatgattttttgggttttggtttttttattttttatatcggtttaataatgattatcgtagagttgttatggaagttaaatgaatttatgtattataagtgattaatataatgattgatatttagtgatttattaataaattaaaatatttattattaatatgatagagaaggtgtcgttaaaatagataataggtttttggaagaggtgattaaatggatgtaaaatttatggattgtttatttcgtttatttttgttgtgttttttggttgtggtatatatacgtgtgggtataaaatcgtaaattttatgtagtcgcgtagtgtatgcgtagaaggtttagatacgaaatgttattttagtaatgtgtttagagaagttttgacgtcgttttggaagtaagtcgttgttgtttgatttttgggcgtttgggacggatgtttatatttgtatttagtagtattggaaggggtttaggtttttcgtagtatagtttatttttagatcgtttagttttttataatatatatttttacggaaaagggtattttttttcgttagaaaaagcgttttagtttggtttgggttggtttttattttacgttgttgtaagtaggcgaagttttttttgtttttttttttggggtaagtggaaaggagttcggtagggggttcgtagtggtttgtataggggaattgggtagcgagagagttttaggtaatttcgggggttgttttatagaagtaggtggggatcgatagtggtttttcggtttagggaggagagcgcggtcgcgggtttttttttttagtttggaggttgtagtcgttcgagtcggttcgggtgggggcggggtgggggcggcgcggagggtacggagattacggcggcgttattcgggatatttagggtttcgaggttttgggcggtttttacgcgagatcgtaaattatgataataggtagttattcgaggttaaataaaaacggagtgggtttttcgcgcgtcgtcgtttttcgcgtttttggcggtttttttcgaggttttcggcggttttacgagttcgtagtagtcggtggcgacgtcgttttcgttttatttttttgcgtaagtgcgaggttgtcggtagcgcggcgtacgtttcggtcgttttcggttttcgcgtaaaatttttattttgtttacgtgaagttgtcgttgttttagagagggggaaagagttgcgggaaaagtcggggagtgacgattgcggcggttgggcgcgtttttttattttttttttttttttttttttttttgtcgtagttcggagttttggttttttttttttttttttttttttcggagtcggttttttttttcgtttcgtttttttttcgtttgtgtacgttatttgttgtggggtggtcgaaggggatgttttgtttttattagaggtatagcgcgaaggggaaatttcgatattggaaggaacgagaataaatatttaattacggacgtattgaatcgcggttgggatagatatttcgggaattcgaggcggatcgggcgacgaggtgagtgatttttttttttaattttcgttttagggttttcgggggagtttgagttgagagaatttttaaatttttcgggaaagtgcgcgaggtttcgtcggggacgtcgagcgttgggtattgaggacgcgtagttggacggtgcgtgggcgtttgcgttttcggggggcgtttggaggtcgggtgttttacgtttgagggttcgggtcgttcggatcgtagcggtgttttttgttttagaagacgtttttaagttttaagggtttttttcgagtttgtttgtttttttcggggtcggcgcggagtttgcgcgtaacggagtttatttagtagtttagcgcgcggtttttatttgtatttcgtttttatttggtagaggcgcgagtatcggggttttttttatattttttttatgacgtgtattattttttgatgattttttagatggtttaggcgcgaggatgttgatttagagtttttcggagggttataggcgtttgggttttttcggtgtcgggtgcgtgtgtattttaaaggttcgcgttttaatttttaggtattgatcgggttttttaattgcggcgattttattttaatagtttttatgtggcgtggattgaatgtt

SEQ ID NO: 180 - DNA, 5649 bp, Artificial Sequence
  chemically treated genomic DNA (Homo sapiens)
cggtggtttatatttgtaattttagtattttgggaggttgaggtaggcggattataaggttaggagatcgagattattttggttaatatagtgaaatttcgtttttattaaaaatataaaaaattagtcgggtgtggtggcgggcgtttgtagttttagttattttggaggttgaggaaggagaatggcgtgaattcgggaggtggagtttgtagtgagttaagatcgtgttattgtattttagtttgggcgatagagttagattttattttaaaaaaaaaaaaagaaaaaagaaaatattttaagttttgaggattatatagtttttgttgtaattatttatttgggttattgtagtataaaaataaatatagataatatatatatgagtgagtatggttggggtttaataaaattttatttatataagtaggtgatgaattacggtttatagtgttttaatttttgatttagatggtgaattattatgagttttcgttgtttttttcggtagaaatatgggagaaattatagagagaaatagagattttaggaaaatagtaaaattaaataaataaagtgagacgtcgttttttttggaggttgtaggttgtgttgaatttgtgtgtgtttgggtgtatagggatgtgagtagatgcgcgtggagatgtgtgtgtgggtggagattgagcgtggttggaggtggttgtggtaggatgttagaaggaaggagtttgtatttagtttttttattagtattttttggagttgttgaggggatgttattgttgaatattgattttggtgtaggttaaatcgaagttagtttttgttattttttgttgggtgaggtattggggagaatagtgggattgaatggggcgggtttttttttttttatattttttttggaaatatttagtattagtatattagaatatggggagttattttttttagcgttgttttttaaggttcggaaggggaaattttgattttaagttttgtttgaagagcgatagtaaaggggagaggttggttgtggtttggtggtgtttattttttttttttgttttgaaattataggttggtatattattcgagagaatgattagtgttattaagggaagggtataagtttattggttttaggggagatattttaggggataggaatattttttgacgttgaatgagtgtagtatatagacggagaatatatataagagaaattatgaggatatgagagaaggtattggtaataggaagttataaaaagtaataaaaagaaagagtagatataaaaataataatcgaagaaagttaataatagatgggatgaattatacgaggtatgcgatttatggatgaagaggtgagtgatgagattagttggggaatttttttttaggaaagataaattagaagaaatataaatgatatcgaagtggttaggcgtagtggtttacgtttgtaattttagtattttgggagttcgaggtaggtggattatttgaggttaggagtttgagattagtttggttaatatgatgaaattttgtttttattaaaaatataaaaattagttaggtgtggtggtaggtatttgtgattttagttatttaggaggttgaggtaggagaattatttgaattaggaagtagagattgtagtgagttgagatggtgttagtgtattttagtttgggtagtagagtgatagtttgtttaaaaaaaaaaaaaggtagtaaagtgataggaggatagattagaagggttattttttagatagtgtaaggaagaaagaagaagaagaagaggaggaggaggaggaagaggaagaagacggagaagagggtattttagaagaaataatggagatatattttttaaaattgaagaaagatgattaattttagatcgaaggttaagaggtaaattagagagatagtttggtaagttaggaagagtattaaagttagataattagagtgaaattaaagaaaatttaaggtgataaaaatttaaaaagtttttttgtgattttagtttattggtgaaaatttaaaaaaaaaaaaaaaaaaaaaaggatagtttgggtaatatggtgaaattttatttttataaaaaatataaaaattagttgggtgtggtggtatatgtttgtagttttagttattcgagaggttaagtaaggtaggaggattatttggggttaagagttttagattagttgcggtaatatatatgttgtgggaagttaggtatttcgaacggagggattggttgaagttatggtagaagaatataaattgtgaagattttatggatatttattatttttttaattaatatttttgtgattttttatgtttgtttttaattttttaattttgttattttcgtaaattgaggatgtatgtcgttttaggattttgtgatgattgcgttaattgtataaattgtttgtagaggataattgttgtgtgtttgagtaatgtgaaatttgggtattttaagaataggataatagtaatttttagggaataagggagataattttaaagtttggttgtttgtgggttgggtaggatagagttatattttttttattatcgtaaataggtaagagaaatatcgttgaattttttttttagtaaggaatattaataattaatagttttgagaaaagaatgtatttttagggtcgggttattgaaatggtttttttgagagtgtttgtttttatttagaagtagaaagggatgaaatacgttttagttttttgtagtatttttagatttgataggattaggaaattttagtttggtaaattttagttagatcggttttttgtttttgaattttgatagtgcgtgttagtgggatttggaagtttattagtgattttagtttcgtcgtgattttttgttttgtgattttttgtcgtttttgaagtatgtgatttttgtgatttatattttgttcgtgtatttttttttttttgaaaattgttaataaaaattcgttggttttacggtttagggggtattacggaatttgcggatatgtgatgttttttttggatattcggttttaaaatgttttttttttgtattttttttttttattttttaggttagtcgatatttagggaaaataggaaaggatttacgtgaaatattgggggttgaatttttttcgataataagttttttaaaaaagatttttaaatgaaatttttttgttttttaatttttatttttgttttgggggtatatgtgaaggtttgttatataagtaaattcgtgttttcggtgtttgttgtatagaatattttattatttaggtattatgtcgagtatttaatagtttttttttttgtttttttttttttttttattttgtattttggagttaattatagtgtttgttgtttttttgtttgtgttataagtttttattatttagtttttatttataagtgagaatatttagtatttggatttttgtttttgtattagtttgttaaggataatagtttttagttttatttatgttttataaaagatatgatttagttttttttaatggttgtattaaatgaagttttaaagatataatataaatattaattttttttttattataaaaattttttgttgaatttgattatatttaaattaacgagttttgttttatgaaagattttttggataaatttgatagttgatggaataggagaagttgtttgttatgtttaaagttaataagagattaatatttagaataaatggagatttgtaaattaatagaaagtaggtagtaaagttaaagaaaatagtttaaggtatagttattaaaaggaacgtgattatgttttttgtagggatatgggtggagttggaagtcgttagttttagtaaatttatataggaatagaaaattagcgagatcgtatggttttatttataagtgggagttgaataatgagaatatatggttatatggcggcgattaatatatattggtgtttgttgagcggggtgttggggagggagagtattaggaagaatagttaagggatattgggtttaatatttgggtgatgggatgatttgtatagtaaattattatggcgtatatatttatgtaataaatttgtatattttttatatgtattttagaattttaaataaaagttggacggttaggcgtggtggtttacgtttgtaattttagtatttttgggaagtcgaggcgtgtagattatttaaggttaggagttcgagattagttcggttaatatggtgaaatttcgtttttattaaaaatataaaaattagttagatgtggtacgttatttataattttatttattcgggaggttgaagtagaattgtttgaattcgagagcggaggttgtagtgagtcgtcgagatcgcgttattgtattttagtttgggttatagcgtgagattacgttataaaataaaataaaataatataaaataaaataaaataaaataaaataaaataaaataaaataaaataaaataaaaaaataaaataaaataaaataaaataaaataaagtaatttttttttttttaagcggtttttattttttttttttgttttgtgaagcgggtgtgtaagtttcgggatcgtagcggttttagggaattttttttcgcgatgtttcggcgcgttagttcgttgcgtatatttcgttgcggttttttttttgttgtttgtttattttttaggtttcgttgggatttgggaaagagggaaaggttttttcggttagttgcgcggcgatttcggggattttagggcgtttttttgcggtcgacgttcggggtgtagcggtcgtcggggttggggtcggcgggagttcgcgggattttttagaagagcggtcggcgtcgtgatttagtattggggcggagcggggcgggattatttttataaggttcggaggtcgcgaggtttcgttggagtttcgtcgtcgtagttttcgttattagtgagtacgcgcggttcgcgttttcggggatggggtttagagtttttagtatggggttaattcgtagtattaggttcgggttttcggtaggtttttcgtttatttcgagattcgggacgggggtttaggggatttaggacgtttttagtgtcgttagcggtttttagggggttcggagcgtttcggggagggatgggatttcgggggcggggagggggggtagattgcgtttatcgcgttttggtattttttttcgggttttagtaaatttttttttgttcgttgtagtgtcgttttatatcgtggtttattttttagttcgaggtaggagtatgtgtttggtagggaagggaggtaggggttggggttgtagtttatagtttttcgtttattcggagagattcgaatttttttattttttcgtcgtgtggtttttatttcgggttttttttttgtttttcgtttttttcgttatgtttgtttttcgttttagtgttgtgtgaaattttcggaggaatttgtttttttgttttttttttgtatttttgattttttttcgggttgttgcgaggcggagtcggttcggtttttatatttcgtattttttttttttcgtagt

SEQ ID NO: 181 - DNA, 5649 bp, Artificial Sequence
  chemically treated genomic DNA (Homo sapiens)
gttgcggggagggagaagtacgagatgtggggatcgggtcgatttcgtttcgtagtaattcggggaggggttaggagtgtagggagggaatagggaaataggttttttcgaagattttatataatattggggcggggagtaggtatggcgggagaggcggggaataggaaggaggttcggggtaaaagttatacgacggagggataagggggttcggattttttcgggtgggcgaggggttgtgggttgtagttttagtttttgttttttttttttgttagatatatgtttttatttcgaattgggaaatagattacggtgtagggcggtattgtagcgaataaagaaaagtttgttggagttcgggggaggatgttaaggcgcggtgagcgtagtttgtttttttttttcgttttcggggttttattttttttcgaggcgtttcgggttttttgaaagtcgttaacggtattggggacgttttgggttttttaggttttcgtttcgggtttcgaggtgggcgaggagtttgtcgggagttcgggtttgatgttgcgggttggttttatgttgggagttttgagttttattttcggggacgcgggtcgcgcgtatttattggtggcgaagattgcggcggcgaaattttagcgaagtttcgcggttttcgagttttataagggtggtttcgtttcgtttcgttttagtgttgagttacggcgtcggtcgtttttttggagggtttcgcggattttcgtcggttttagtttcggcggtcgttgtatttcgggcgtcggtcgtagaggggcgttttggagttttcggagtcgtcgcgtagttggtcggggaagttttttttttttttttaggttttagcggggtttagggagtaaatagatagtaggaagaggatcgtagcgaagtgtgcgtagcgaattggcgcgtcgggatatcgcggggggaaattttttaagatcgttgcgatttcggagtttgtatattcgttttatagggtaggggagaggggtggaggtcgtttagaggaaaggaaattgttttattttattttattttattttattttatttttttattttattttattttattttattttattttattttattttattttattttgtgttattttattttattttatgacgtagttttacgttgtggtttaggttggagtgtagtggcgcgatttcggcggtttattgtaattttcgttttcgggtttaagtaattttgttttagtttttcgagtaggtggaattataggtggcgtgttatatttggttgatttttgtatttttagtagagacggggttttattatgttggtcgggttggtttcgaatttttgattttaggtgatttgtacgtttcggttttttaagagtgttgggattataggcgtgagttattacgtttggtcgtttaatttttatttgaagttttggggtatatgtagaggatgtgtaggtttgttatataggtgtgtgcgttatgatggtttgttgtatagattattttattatttaggtattaagtttagtattttttagttattttttttggtattttttttttttagtatttcgtttaataggtattagtgtgtgttgatcgtcgttatgtgattatgtgtttttattgtttagtttttatttataagtgagattatgcggtttcgttggttttttgtttttgtgtgagtttgttgaggttaacggtttttagttttatttatgtttttgtaaaggatatgattacgttttttttagtggttgtgttttaggttattttttttggttttgttgtttattttttgttgatttgtagatttttatttattttagatattgattttttgttggttttagatatgatagatagttttttttattttattaattgttaagtttgtttaaggagttttttatgaaataaaattcgttaatttaagtgtaattaaatttagtaagggatttttgtggtggggaagaggttggtgtttatgttgtatttttaaaattttatttaatgtagttattaaaaagaattagattatgttttttgtgggatatggatggagttagaggttattatttttagtaaattaatgtaggaatagaaatttaaatattggatgtttttatttgtaagtgggagttaaatgatgagaatttataatataaataaggaaataatagatattgtggttgattttagggtgtaggatgggaggaaggagaggagtagaaaagagaattattgggtattcggtataatatttgggtgatgaaatattttgtataataaatatcgaagatacgagtttatttatgtaataaatttttatatgtatttttaaaatagaaataaaagttaaaaaataaagaaattttatttaaaagttttttttaagagatttattatcgggggaaatttagtttttaatattttacgtgggtttttttttattttttttaagtgtcggttggtttgagaaataaagggaaagagtataaaagagagatattttaaagtcgggtgtttaggggagatattatatgttcgtaggtttcgtgatgttttttgagtcgtaaaattagcgagtttttattagtaatttttaaagaggagggagtgtacgaatagggtgtgggttatagagattatatattttaagggcgataaaagattatagggtagaaggttacggcgaaattagaattattaatgaatttttaggttttattggtacgtattgttagggtttaagagtagagaatcggtttgattagaatttgttaggttggaattttttaattttattaagtttgggggtgttgtaggagattagggcgtgttttatttttttttatttttgaataaaggtaggtatttttagggaggttattttagtggttcggttttgggaatgtattttttttttagggttgttaattattaatattttttattggggaaagaatttagcgatattttttttatttgtttgcggtaataagagaagtatggttttgttttgtttagtttataggtagttagattttaaggttattttttttgttttttgaaaattgttgttattttgtttttaagatgtttagattttatattgtttaaatatataataattgttttttataaataatttgtgtagttaacgtagttattatagggttttaaggcgatatatatttttagtttacgaagatgataggattaagagattaaagataggtataggaaattataagagtattgattggggaagtgataaatgtttatgaaatttttataatttatgtttttttgttatggttttagttagttttttcgttcggggtgtttgattttttataatatgtatgttgtcgtagttggtttggaatttttggttttaagtgatttttttgttttatttagtttttcgaatagttgggattataggtatgtgttattatatttagttaatttttgtattttttgtagagatggggttttattatgttgtttaggttgtttttttttttttttttttttttttaaatttttattaatggattgaggttataaggaagttttttaaatttttgttattttgggttttttttaattttattttaattgtttagttttggtgttttttttggtttgttaagttgtttttttggtttgttttttggttttcggtttgaggttggttatttttttttagttttgagaaatgtatttttattgttttttttgagatgttttttttttcgtttttttttttttttttttttttttttttttttttttttttttttttttttgtattatttggaaaatggtttttttaatttatttttttattattttattgtttttttttttttttagataggttgttattttattgtttaggttggagtgtattggtattattttagtttattgtaatttttgttttttggtttaagtgatttttttgttttagttttttgagtagttgggattataggtgtttgttattatatttggttaatttttgtatttttagtagagatagggttttattatgttggttaggttggttttaaatttttgattttaagtgatttatttgtttcgggtttttaaagtgttgggattataggcgtgagttattgcgtttggttatttcgatgttatttgtgttttttttggtttgttttttttgggagagagttttttagttgattttattatttatttttttatttatgagtcgtatatttcgtatgatttattttatttgttgttggtttttttcgattattgtttttatatttattttttttttttgttgttttttgtaattttttattgttagtgtttttttttatgtttttatgattttttttgtgtgtatttttcgtttgtgtgttgtatttatttagcgttaggggatgtttttgttttttgagatgttttttttggaattagtgagtttgtgttttttttttggtggtattggttattttttcgggtagtatgttagtttgtggttttaaagtaaaggaaggagataagtattattaaattatagttaattttttttttttgttatcgttttttaaatagagtttgaggttagagttttttttttcgaattttgggaagtagcgttggggaaggtggttttttatgttttaatgtgttggtgttgggtgtttttaggggaagtgtgggagggagaaagttcgttttatttagttttattgttttttttagtgttttatttagtagagggtagtagaggttaatttcggtttagtttgtattagggttagtgtttagtagtgatatttttttaataattttagagagtattaataaaggaattgaatgtaaattttttttttttggtattttattatagttatttttagttacgtttagtttttatttatatatatatttttacgcgtatttatttatatttttgtatatttagatatatataggtttaatatagtttgtagtttttaggaggggcgacgttttattttatttgtttaattttattgtttttttgaaatttttgtttttttttgtggttttttttatatttttatcggagagggtaacgaaagtttatgatagtttattatttaaattaaggattgggatattatggatcgtggtttattatttgtttgtgtaaataaagttttattgggttttagttatgtttatttatgtgtgtgttatttatgtttgtttttgtgttatagtggtttaaatgagtgattgtaatagagattatgtggtttttaaagtttaagatatttttttttttttttttttttttttgagatggagtttggttttgtcgtttaggttggagtgtagtggtacgattttggtttattgtaagttttatttttcgggtttacgttattttttttttttagtttttagagtagttgggattataggcgttcgttattatattcggttaattttttgtatttttagtagagacggggttttattgtgttagttaggatggtttcgattttttgattttgtgattcgtttgttttagttttttaaagtgttgggattataggtgtgagttatcg

SEQ ID NO: 182 - DNA, 12781 bp, Artificial Sequence
  chemically treated genomic DNA (Homo sapiens)
tattatgttgttagttggttttgaatttttggttttaagttatttttttgttttggttttttaaagtgttgggattgtaagtgtgagttattgtttttggttagttggtgatttatttgtataattgtttaatttattgaatacgtatggcgtgttaagtattgggttgagggttttataatgtttttttatttaatgtttagtataatttatgaagaaggtagtgttaatattatttttgttttatagatgtagaaattgaggtataggttaaataatttgtttaataagttcgtgtagtttagtaagtagtttagttgggatgtgaatataaattttgaatatagagtttttaattagtaggttagaggtttttaaatatttagtatatttattattttagtatttttttgttatattttttaggttaaaataattttattgattgttatgtaatttattaagtgtagttatttgaaaaaaaaatatatataaaagaaaaatatttttatttagtttttaaaataatttatatatagttatggaatgtatgtgttggttgggtattgtagattaaagatagtttagggtcgggtacggtggtttaggtttgtaattttagtattttgggaggttaagtagagagaagggtttgagtttaagagttggagatcggtttgggtaatatagtaagatttagtttttatagaaaataaaattattagggtgtgaggacgtatatttgtagttttagttgtttgggaggttgaggttggaggattagtttgggtaatagagtgagattttgttttagaaaaaaaaaaaaaaaaagatagatttttatttagatatgtatgtaggagtttatagaaaaaaaaagtgagtttaggaggttgttatttggtatttatataatttttttttttttgaatttcgaaatttattttatatatattatttaataggggaagaggagggagaaaaagttttttatgggaagaataaataggtttttgggggaataaaagggagataagaatgtttgtttttgtaggtgtaagtggtttttgtttttttttttggttattaaaatttttttagagaggagatttacggtagttttatttttagaaatttttgttgttagtcgtataagggaagttttgaaacggtatttttttgtatttgttggtttttaaatgtttttagttttaagtaatatttatgttaattttgggggtttgagtgtttttatataatatatgtgtttttttgttttttaatgaagtttgtgggaggtatttaattgtagtttttaaaatttggtttataggtattattgtttttattaaagacgaggaaataagtttagaaaagtattaattgtttcgagttatttgtttggttagttaggattagagtttagttttttatttaatttaaagtttaggtttttaattttttataattggcgtattttttttgaatttttattttttttttgtaaaagaataatatcggtcgggcgtagtggtttatatttataattttagtattttgggaggtagagatgggcggattacgaggttaggagtttgagattagtttggttaatatggtgaaattttatttttattaaaaatataaaatttagttgggtgtgttggtgtttgtaattttagttatttaggagattgaggtaggagaattgttttaatttgggaggcggaggttgtggtgagttaagatcgtgttattgtattttagtttcggtgatagagtaagattttatttttaaaaaaataaataataataataaaaagagaataacgttatatttagttgaattaaaatgaattaaatattaatatttgtattttaaaaacggtttagtttggttgggcgtagtggttttcgtttgtaattttaatattttgggaggtcgaggtaggaggattatttgaggttaggagtttgagattagtttggttaatatggtgaaattttgtttttattaaaaatataaaaattagttgggtagtagtagcgcgtgtcggtaattttagttatttaggaggttgaggaaggagaattgtttgagtttgggaggtgaaagttgtggtgagttgagattgtattattgtatattagtttgggagatagagtaagattttgttttaaaataaaataattaaaaaattaaaaaggtttagtttgggtaatatagtgaaatttcgtttttatagaaaatttttaaaatattagtagggtatcgggtatagtggtttatatttgtaattttagtattttgggaggttgaggtaggcgggttatttgtggttaggagtttgggattaggtaggttaatatggtgaaatcgtgtttttattaaaaaataaaaattagttgggtatggtggtaggtattagtaattttagtatttaggaggttgaggtatgagaattgtttgaattcgtaaagtaggggttgtagtgaattaagatggcgttattgtattttagtttgggtgatagaataagattttttaattaaaaaaaaaaaaaattagttgggtatggtgttgcgggtttgtggttttaggtatttaggaggttgaggtgagaggattatttaagtttgggaggttgaggttatagtaagttaagattacgttattatattttagtttttgtgatagagttagattttgttttaaaaaaattttaaaaagggtaaattttggtaattttatatagtttaatttagtataaggtggttgtaataattaaatgagataaaatggtgttaaattggaagtattatagtatttttgttaataatatagggttttagaattagtttttttgagtttaaatttaggttttattattttttagttatgtagttatgggtaagttatttgatttaattgtgttttagttttatttatgatatggagatataggataattagttttttacgtgtaattttgaaatttaaaaagttttgtaaattaaaagtttgggggtaaatttatttggtagtaaattttgatttgaggttatttatagtttatattttgtattttttttatttagtatgaataagtatgtaagttttattgtatgtttgattttagtatgtttttttagattttttgggggtgtttacgtatgtcggtgggggaaagagattaatttttaaatattattttaaatagttggttttattgtgtttgtttgggtagtatatatattaaaattggaatgatttttgtatagggatgaaatgtaaattcgtgaagtatattgtattttttttagtatatattatttttggtaatattttttttttttttttgagagggagttttgttttgtcgtttaggttggagtgtagaggcgcgatttcggtttattgtaagtttcgtttttcgggtttatattatttttttattttagtttttttagtagttgggattataggcgtgtgttattacgttaggttaattttttgtatttttagtagaggcggggttttattgtgttagttaggatggtttcgattttttgatttcgtgattcgtttattttcgtttttttttcgaagtgtcgagtgttgggattataggcgtgagttattgcgttcggttttcgttttttttttttagattgattttattatttgtttagtaaaggagaattttttggtagaatagtttttaagaataaggtaaataattaattttatataggtttttattaatgtatagttgttgattgtgattggttttcggtaatttggattttataatttggataaggggataaataattgtttgttttttattattttttttgaatttgaatagaatttttttatttttatagttttttagtttttttttttttttttttgagacggagtttcgtttttgtcgtttaggttggagtgtagtggcgcgattttggtttattgtaaacgttgttttttaggtttaagttatttttttgttttagttttttaagtagttgggattataggcgtatgttattacgttcggttaatttttggatttttagtagagacgggggttttattatgttgattaggttggtttttaacgtttgattttaggtgattcgttcgtttcggtattttaaagtgttgggattataggcgtgagttattgcgttcggttttttatagttttttagttttttaaaatttgaaaaattttgtaaagatatatttgggttaaagggtttagataacggattgtggtttttaagtatttacgttataggttattgagaggatcgatttagttattagatgtaaaatgttgggattagtgtttggtaaaggaaaattttgtatagttgtaggtttttattatatataatagtatcgttaacgaatgttattataatatttatttagcgtttattaagtgtttattttatataaattttgagaatataacgtgaaggtgaattgttgattaaagtttggtttttttcgtttcgtttttttgcgaaaatgttttaacggtaggaggttacgcgagcgttggacgcgttttttttcgcgagttttttttcgaggtttttcgggttttttcggttattttcgttcgggcggtgcgcgttttcgttgttttcgttttcgttttagagaggtagggtttttcgagtttgttagtttcgcggtcgtaattaatttcgggtcggagtgtttcggttcggttagtttcgcggcgtgagggaaggggagtttagtagtttttcgcgcggggtttaggcgtcggcggtagggcgggttttttatcgttagcgtgttagtttcgtttttatttattagtgtgttagtttcgtttttttttacgtcgtcgcgcgttcgggggcggggtttggcgcgtatcgttcgcgtacggcgaggcgtttgttgattggttattggggttcgggttttttcggcggagcgcgtttttttttagatttttcgttagtaggagtcgcgcggtagatgcggtgtttttaggagtttcgttcgatagaacggttgggttttgtcggttgtcggtatgtcgcgatagagtattttgtatagttttttttttaagttttcggcgttgagtgatgttaataaggtttcggttagggttttacgcgaaggcggtcgtgtcgtcgttgttttcggggtttttttttttttaggcggggatgcggtttggagcgaggttgggtttgggtttaggtttttggcgcgtttcgcgttatcgtttaaggcgaagaattttaacggagggttgcggagatcggtagcgtttgttgtttttattaggtagcggggtgggggtggggtcgaaggcgggggtatagcggcggggcgtttggaattcggcgaggggaggttcgtatagggggttgggggggtgtacggtttggttttgggttcggaggaggcggggtcgtagagttggtttgaatgagtgtaggggtcgagtttggagtatttgggggtgtagtttgtaaatagggtcggaggagagaggttgtgtaggaagagggttgtaggggagacgcggagagttcgggttttttggagggaggagacgcgtttcgttaggtgggggtgttgggttaaggaaggggcgacgcgcgtagtttcgggtggggagggggtttgggaggtgggagtattgggggtggggcgagaaggggaaggcgttcggtttatttggtgggcggggcggggggcggggtggcgggaaggaggaatgtttgcgggaggtcgaacggggagagttcggtggtgtggggtgcgaaaggaggtttttcggtcggcgcggagatagtgagttggggttttagtagtcgatcgaggtagatatttagaggtagttaagagtcgcggtcgtcgagacgttttggggacggtgggttttcggtttaggtgaggggtcgtcgagggggtgggttacgagttgcgagcgcgggggggtgtgttattatggggatcgcggggtttaattgggcggggcggggtcgtggggagtcgaagtgttgggattcggttgggtttttcggtaggtaggttgtacgtgtatcgagacgaagatagaatattttgacgtatgtggaaattcgtgtcgagtggaaaatattttattttatgaaatagtgtaatttttatggggtattattgggtttttagaggttttaatcgggcgttggataaagatgtgtggacgtgagtgatttcggggaagtttgtcgggagttgtttttattttatgggtagttaagtgttttttttttttttttttttttgagagagagtttcgtttaagtttaggttggagtgtaatggcgcgattttagtttatcgtaattttcgcgtttcggttttaagcgattttttagttttagtttttcgagtagtcgggattataggaatgcgtttttatatttcgttaattttgtatttttagtagagacggggtttttttatgttggttaggttagtttcggaattttcgattttaggtgatttattcgtttcggttttaaagtgttgggattataggcgttagttatcgcgttcggtttgtttagggttttttattcgggtagttggcgatattttgaaaagtttgtttttgttgtttgttagatatatatatatgtattttgagatagagttttgtttttttgtttaggttagagtgtagtggcgcgtttttggtttattataatttttgtttttggattaagagattattttgttttagttttttaagtagttgggattataggtgcgttttattacgtttggttaatttttgtatttttagtagagacgggttttattatgttggttaggttggtatcgaatttttgattttttgatcggttcgtattggtttattaaagtgttgggattataggtatgaattatcgagttcggtcgtttgttagatattaaatataaagtttaatggtcgttatttgaataaacgaagaaataaaggtttagaaaaaataatttatttaagataagagttagttcgtgttttttgtttggttttgttttgaaatggagtttcgttttgtcgtttaggttggagtgttgtggcgttttttcggtttattgtaatttttgttcgtcgggtttaagtgatttttttgttttagtttttcgagtagttgggattacgggtgtgtttatcgcggttcggttgattttttattatggagttttattatgttggttaggttggttttgaaattgttgattttaagtggtttatttattttagttttttaaagtgttgggattataggtgtgagttatcgtgttcggtcgttagttagtggttttgagtaatggattttaaatttatttaaatttagtttaaagtgttttaaaggaattttgagatttttttaagtgtaattatagtgttatttttgtttaagcgattttttttcgtagtttaaatatatatagttgtgtattagtagaatatgtttgtggggaatagagttagtattcgtaataataaatttttggttagaaaagtatgacgtattgtttatttgagtatgaattgattgttgaatttaaattaaacgggtgtatttattgtaaggatgtattttatatttatattgaatagcgtatgttatttgttttttgaggttgagtttaagagatttgtaaaaataaaacgtatatattttatttttcgttatggagaggattttagggtatttaagaaagatgggtatttgatattaggtttttaaagaaattgtagtgtttagattattttgtcgagtatagtattaggtattatggattttggatataattatgaataggataaagtaaagaggtaattgtagattttaagtggaaaggggacggagaggatgcgggttaggttaggtttttagttttgtaaatcgaaattagaaggataaataagtttagatagattatagtgagagtgggaagttggtttaggaagaggaaggtttgtaaattgtgggtaggatgaaaggaggaggagggagtattggagaagttaagtagagatttaattatgaatagtttgatgagttatagagatattcggatttattttatgaattatttaagttttaaaatatgttgagcgtattttttttttttttgagacggaattttatttttgttgtttaagttggagtgtagtggtgtggttttagtttattgtaattttcgttttttgggttttagcgatttttttgttttatttttttaagtatttggtattataggtgtttgttattacgtttagttaatttttgtgtttatagtagagacgggttttattatgttggttaggttagtcgtgaatttttgattttaggtgatttatttattttagttttttaaagtgttgggattataggcgtgaattatcgtatttggtcgtgagttatcgtgtttgttcgagtattttttaatgtttgttatttagatttttttttgtgttgaagtgtttgttttttgttgtttttttttttttttttagttttttgttatttgtgtgtgatataaatgtttttttttataatgagtttttttatttagtttatggttttgttgttgttgttgaataatagaggttttattttgttgtttaggttggtgttgaatttttgtttttaagcgatttttttattttagttttttaatttgttgggattataagtgtgagttattatatttagttttatggtatttttcgatgaataaattattgattataatgtggaatttgtttttttattttttttgtggttagtgtttttataggttttatttaagaaatttatagggaggttgggtgtagtggtttatgtttgtaaatttaatattttgggaggttaaggtaggttaatatggttagattttgtttttttaaaaaataagaaaattagttaggtatggtggcgtgtgtttgtagttttagttttttgggagattgagatgggaggatcgtttgagtttaggaggttgaggttgtagtaagttaagagattatgttatgtattttagtttgggtggtagagttagattttgtttgttaaaaaataaaataaaagttggtgaaaatgttgattatatattttaggaataattagtaattgatattaaaattatgggttaaagagaaagtaaaaataatgtgattttaaattagaatttaaaagatttgtttagcgtatgtttagataaagttattatttattatattaaagttttaatatttattttgtgagttgttagtttttttttttaatatttttttttatcgttttaaaaaattttaagaatatcggatatttaagatttatttaaagttttaaaagtatttgtaaaattttaaaattataatttaaggtgtttttggagggtaggagtaatggtggtaggtagtgttttgttttgttgtttaggttgaagtatagtggtagatttcggtttattgtattttcgatttattcggtttaagtgatttttttattttagttttttgagtagttgggattttaagtgtatattattttatgtttggttaatttttaaatttttttgtagaaataaggttttattgtgtagtttagatggtttcgaatttttgggtttttaagagatttttttaaagtgttgggattataggtgtgagttattatatttggtttattttggtatttttgaaaatcgtaggattattacggataaaattttaaaattatttttaaagaatttaggtttatatataaaaaaaatttggtttgttagtagtgagtgaagaaaaattttgagaaatgtttaaaatttttagttttgttatataatatattttattatttgtttaattattttttttgatttagaaattagttttttgggtttaggatgtttagtggtattttttttttttaagttttttagtattggaggaattgtatattagtaaaatttttagttttagtattttatagtttattgttatttttttttttttatttttttttttttttttttttttttttttttttttttgagatggagtttcgttttgttatttaggttggagtgtagtggtacgatttcggtttattgtaatttttgttttttaggtttaaatgatttttttgttttagtttttcgagtagttgggattatagatgttcgttattatgtttagttaatttttatttttttagtagagatggggttttattatgttggttaggttagtttcgaatttttgatttcgtgattaattcgttttggttttttaaagtgttgggattataggcgtgagttatcgtgtttagtttttttttttttttttttttttttttttttttttttgagacggagttttgttttgttatttaggttggagtgtagtggtatgatttgggtttattgtaatttttatttttcgggtttaagggagttttttgttttagtttttcgagtagttgggattataggcgtttgttattatgtttagttaatttttgtatttttttagtagagatggggtttcgttatgttggttaggttggttttgaatttttgattttaggtgatttgtttgtttcgtttttttaaaatgttgggattataggagtgagttattgcgttcggtttagtatattgttatttttttttttttttttttttttttttttttttttttgtttttttttttttttttttttttttgtgagacggagtttgtcgtttaggttggaatgtagtggcgtttttttggtttattgtaatttttgttgttcgggtttaagtgatttttttgttttaggtttttaagtagttgggattataggtttttgttattgtatttggttaatttttgtatttttggtagagacggggttttattattttggttaggttggttttgaatttttgatttcgtgatttatttgttttggttttttaaagtgttgggattatagatttgagttatcgtattcggtttatattgttattttttaatagtagagaaattatgtgttagattttgtaagtgtaatggtatataaaggataaaatgatgttgaaaaataaaattttttgtttaaatgtttatgtttttaatattttattttagaaaggaatttattttaaaattgataatggttggatttagttttttatataaattttttttttttagtgaggatgtatatttattttgtaaataaatggaagatattatttttttaattgtttgtttagaaatgaaataatttttttttaatgattttttaaagtatgagattttatatattatttaaaataatttatattgtattttatatatgataaagttttaaggtaatagtttttttttaagattaaagttatagttttttttttgtatttgagggggattggttgtaggatttttttgtgaatatttaaatttttggatgtttaagttttttatgagatgtagtatttgtatataatttatatatatttttttttgtattttatttttagattacgtataatatttaatagaatgtaaatgttttgaaattagttgtttagttgtattttaaattttgtatttttttttttttttttttgagatagagttttgttttgttgtttaggttggagtatagtatagtgattatagtttattgtatttttaattttttaggtttaagttgttttgtttcggtttttttaagtgttgggattataggtgtgagttattatatttggttattgttttttattggttttaaatttttgatttaaaatttttaatttaggttggttgaatttggattggaatttaaggatatgtttgttgagtatattgtatttattttggaatataattagaatgtttaatttgtatgttaaaaatattttatttggttaggcgcggtggtttacgtttgtaattttagtattttgagaggttaaggcgggtgaattatttgaggttaggagtttaagacgagtttggttaatatggtaaaattttgattttataaaaaaaaggtaaaaataagttaggtgtgatggcgtgtgtttgtagttttggttatttaggaggttgagatataagaatcgtttgaatcggggaggtacgttacgtttttagttgttgatttgagttttttcgtagtttgtagggggagggtaatagagtattaggtagtttttggaatatataggagtgtaattggaaaaagattttaagtaagtttaatgaattagataatttatttaattagtaaattatgtaattagtatgttttataataatattgtgagttagattttgtttttgatatgtatatattatattgtataggtgttattaatttggagagtatatatagtgagtttatgttttttttttgttattagtattatattaaaattttgttatggtttttaaattttgattttgagaaagttttttattttaataatataattatatttgtgtttgtttttatagttaaatatgtattatgatattagtttgtatatattttttaaatgatttgaatatttgattttaaaaattattttagaatttttgtgttttaatattaatgttagaagatttggaattgtttatttgtaggtaattgtttttaaggaaatttgattaaatattaattaagttatgtatttttttttggtaatagt

SEQ ID NO: 183 - DNA, 12781 bp, Artificial Sequence
  chemically treated genomic DNA (Homo sapiens)
attgttgttaaaaggaaatatataatttagttaatatttggttaagtttttttaaaggtagttatttataaataaataattttaagttttttggtattaatattgaagtatagaaattttagaataatttttaaagttagatatttaagttatttaaaaaatgtatgtaagttgatattataatgtatatttaattatgaagataaatataaatatagttatgttattagggtgagaaatttttttagaattaaagtttaaaaattatggtagaattttggtataatgttgatggtaggaaaaaggtatggatttattgtatatgttttttaaattagtagtatttatataatatggtatgtatatattagaaataggatttaatttataatattattataaagtatattgattatataatttattaattaggtaaattatttaatttattagatttgtttggaatttttttttagttatatttttatgtattttaaaagttatttaatattttattattttttttttataaattacggaaaaatttaagttaataattgagggcgtaacgtgttttttcggtttaagcgatttttgtgttttagttttttgaatagttaagattataggtatacgttattatatttggtttatttttattttttttttgtagagttagggttttgttatgttggttaggttcgttttaaatttttgattttaaatgatttattcgttttggttttttaaagtgttgggattataggcgtgagttatcgcgtttggttaaataaagtatttttaatatataagttaagtattttagttgtattttaaagtaaatatagtatgtttaataaatatatttttgggttttagtttagatttaattaatttagattaaaaattttaaattaaaaatttaaaattaataaaaaatagtgattaggtatgatggtttatatttgtaattttaatatttggggaggtcgaggtaggatagtttgagtttgggaggttaaaggtgtagtgagttgtgattattgtattgtattttagtttgggtaatagagtaagattttgttttaaaaaaaaaggaaaaaaaatataaaatttaaaatatagttgaataattaattttaaagtatttatattttattaggtattgtacgtaatttagagataaagtataggggaagatgtgtataggttatatgtaaatattatattttataagggatttggatatttaaggatttgggtatttataggggggttttgtaattaattttttttagatataaagggaggattgtaattttagttttagaaaagggttgttattttagaattttgttatgtgtaaaatatagtataaattgttttaaatgatgtatgaggttttatgttttaaaagattattagaaaagaattattttatttttaagtaagtaattaaaaaaataatgttttttatttgtttataggataaatgtgtatttttattaggaaaaaaaagtttgtgtgaaaagttggatttaattattattagttttgaaataaatttttttttgaaataaaatattagaaatataagtatttaaataaaaaattttgttttttaatattattttattttttatatattattatatttatagaatttgatatataatttttttgttgttaagaaatagtagtatgggtcgggtgcggtggtttaggtttgtaattttagtattttgggaggttaaggtaggtggattacgaggttaggagtttaagattagtttggttaagatggtgaaatttcgtttttattaaaaatataaaaattagttaagtgtagtggtagaggtttataattttagttatttgggagtttgaagtaggagaattatttgaattcgggtagtagaggttgtagtgagttaagaaaacgttattgtattttagtttggacgatagatttcgttttataaaaaaaaaaaaaaaaaaaaaaaaataaaaaaaaaaaaaaggaagaagaaagaaagaaagaaatagtagtatgttgggtcgggcgtagtggtttatttttataattttagtattttgggaggacgaggtaggtagattatttgaggttaggagtttaagattagtttggttaatatggcgaaattttatttttattaaaaaaatataaaaattagttgggtatggtggtaggcgtttgtaattttagttattcgggaggttgaagtaggagatttttttgaattcgggaggtggaggttgtagtgagtttagattatgttattatattttagtttgggtaatagagtaagatttcgttttaaaaaaaaaaaaaaaaagaaaaagaaaaagaaaaaggttgggtacggtggtttacgtttgtaattttagtattttgaaaggttaaggcgggttgattacgaggttaggagttcgagattggtttggttaatatggtgaaattttatttttattaaaaaaataaaaattagttgggtatggtggcgggtatttgtaattttagttattcgggaggttgaagtaggagaattatttgaatttggaaggtagaggttgtagtaagtcgagatcgtgttattgtattttagtttgggtgatagggcgagattttattttaaaaaaaaaaaaaaaaaaaaaaaaaagaaagaaagaatgaaagaaaagaaatagtagtaagttataaaatgttaagattaaaaattttattaatatgtagtttttttaatgttaaaaagtttgaagaaaaagagtattattaaatattttggatttaggaaattggtttttgagttaaaaaagataattaaataggtagtaaaatgtattgtgtaataaaattaaaaattttaaatattttttaaaatttttttttatttattgttaataaattaaattttttttgtgtgtaaatttgaattttttaaaggtaattttaaaattttattcgtggtaattttgcggtttttaagaatgttaaaataggttaggtgtggtggtttatatttatgattttagtattttgggaggattttttaagagtttaggaattcgagattatttgggttatatagtgagattttgtttttataaaaaaatttaaaaattagttaggtatggggtggtgtgtatttggggttttagttatttagaaagttgaggtgggaggattatttgagtcgaataggtcgagggtgtagtgaatcgagatttgttattgtattttagtttgggtaataaagtaaaatattgtttgttattattgtttttgttttttaaaaatattttaaattatgattttaggattttgtaagtgtttttaaagttttaagtgagttttaaatgttcggtatttttggggttttttaagacggtggggaaaaatgttaagaggaaaagttgatagtttataaaataaatgttaaaattttgatataataagtaatggttttgtttaaatatacgttaaatagattttttgaattttggtttaaaattatattatttttgttttttttttagtttataattttgatgttaattattagttgtttttaaaatatataattaatatttttattaatttttattttattttttggtagatagggtttgattttgttatttaggttggagtgtatggtatgattttttggtttattgtagttttaattttttggatttaagcgatttttttattttagttttttaagaagttgggattataggtatacgttattatgtttggttaatttttttattttttggagagatagggtttagttatgttggtttgttttggttttttaaagtgttgggtttataggtatgagttattgtatttagtttttttgtggattttttaaataaaatttatagaaatattaattatagagaaaataaaaggataaattttatattataattaataatttgtttatcgaaagatgttataaggttgggtgtggtggtttatatttgtaattttaataggttgggaggttgaagtgggaggatcgtttgagagtaagagtttaatattagtttgggtaataaagtgagatttttattatttaataataataataaagttataaattaaatgaaagaatttattgtgaaagaagatatttatattatatataaatgataaagaattaggaaaaaaaaaagaaatagtaaaagataaatattttagtataagaagaaatttaaatgataaatattaaaagatgttcggatagatacggtggtttacggttaggtgcggtggtttacgtttgtaattttaatattttgggaggttgaggtgggtggattatttgaggttaggagtttacgattggtttgattaatatggtgaaattcgtttttattataaatataaaaattagttgggcgtggtggtaggtatttgtaatattaggtatttgagaggatgaggtaggagaatcgttggaatttaggaggcggaggttgtagtgagttgagattatattattgtattttagtttgggtaataagagtgaaatttcgttttaaaaaaaaaaaaaatacgtttaatatgttttaaggtttaaatgatttatggagtaagttcgaatgtttttgtagtttattagattgtttatgattggatttttgtttaatttttttaatgttttttttttttttttttattttatttataatttgtagatttttttttttttgaattagttttttatttttattataatttgtttaagtttatttgtttttttggtttcggtttatagagttgagagtttagtttgattcgtatttttttcgttttttttttatttggagtttataattgtttttttgttttgttttgtttatggttgtatttaggatttataatgtttaatgttgtgttcggtagagtgatttagatattgtagtttttttagaaatttagtattaaatgtttattttttttgaatattttggaattttttttataacgggaggtgaaatgtatacgttttatttttataagttttttaaatttaattttaagaaataaataatatacgttatttaatatgaatgtaaagtatatttttataataaatatattcgtttggtttggatttaataattaatttatgtttaagtaaataatacgttatgtttttttaattaggagtttgttattgcggatgttggttttgttttttataagtatattttattaatgtataattatatatatttaaattgcgggaaagggtcgtttaaataagggtaatattataattatatttagaaaaattttagaatttttttaggatattttaaattggatttaaatggatttgaaatttattatttaaaattattaattagcggtcgggtacggtggtttatatttgtaattttagtattttgggaggttgaagtgggtggattatttgaggttagtagttttaagattagtttggttaatatggtgaaattttatggtgaaaaattagtcggatcgcggtgggtatattcgtaattttagttattcgggaagttgaggtaggagaattatttgaattcggcgggtagaggttgtagtgagtcgagaaagcgttatagtattttagtttgggcgatagagcgagattttattttaaaataaaattaaataaaaaatacgaattggtttttattttgaatgagttattttttttgagtttttattttttcgtttgtttaaatagcgattattaaattttgtgtttagtatttgataaacggtcgggttcggtggtttatgtttgtaattttagtattttggtaggttaatgcgggtcgattaagaggttaggagttcgatattagtttggttaatatagtgaaattcgtttttattaaaaatataaaaattagttaggcgtggtggggcgtatttgtagttttagttatttgggaggttgaggtaggataattttttgatttagagatagaggttgtggtgagttaagaacgcgttattgtattttagtttggataaaagagtaagattttgttttaaaatatatatatatgtatttggtaaatagtaaaagtaagttttttaaaatgtcgttagttgttcggataaaaagttttaaatagatcgggcgcggtggttagcgtttgtaattttagtattttgaggtcgaggcgggtggattatttgaggtcgggaatttcgagattagtttgattaatatggagaaatttcgtttttattaaaaatataaaattggcggggtgtgggggcgtatttttgtaatttcgattattcgggaggttgaagttggggaatcgtttgaagtcgggacgcggagattgcggtgagttgagatcgcgttattgtattttagtttggatttgagcgaaatttttttttaaaaaggaaaaaaaaaaaaaagtatttaattgtttataaagtgaggataattttcgataggttttttcggagttatttacgtttatatatttttgtttagcgttcgattaaggtttttaaaagtttagtggtgttttataaaaattatattattttataaaataaaatattttttattcgatacgaatttttatatacgttaaaatattttattttcgtttcggtgtacgtgtagtttatttatcgaaggatttagtcggattttagtatttcggttttttacggtttcgtttcgtttaattaggtttcgcggtttttatggtgatatattttttcgcgttcgtagttcgtggtttattttttcggcggttttttatttaggtcgaaggtttatcgtttttaaggcgtttcggcgatcgcggtttttaattatttttaagtgtttatttcgatcgattattggagttttaatttattattttcgcgtcggtcgaggaattttttttcgtattttatattatcggatttttttcgttcggtttttcgtaggtatttttttttttcgttatttcgtttttcgtttcgtttattaagtgggtcgggcgttttttttttttcgttttatttttagtgtttttattttttaggttttttttttattcggagttgcgcgcgtcgttttttttttagtttagtatttttatttggcgggacgcgttttttttttttaaaaggttcgaatttttcgcgttttttttgtagttttttttttgtatagtttttttttttcgattttgtttataagttatatttttaaatgttttagattcgatttttgtatttatttaagttaattttgcggtttcgtttttttcgagtttagggttaggtcgtgtatttttttaattttttgtgcgagttttttttcgtcgggttttaagcgtttcgtcgttatgttttcgttttcgattttatttttatttcgttatttggtgggggtagtaggcgttatcgattttcgtagtttttcgttgaggtttttcgttttgggcggtgacgcggagcgcgttaagggtttgggtttaggtttagtttcgttttaggtcgtattttcgtttggggaaggagaggtttcgggggtagcggcggtacggtcgttttcgcgtgaggttttggtcgaggttttgttggtattatttagcgtcggagatttggggaagaagttgtatagggtgttttgtcgcgatatatcgatagtcggtaaggtttaatcgttttgtcggacggagtttttaaaagtatcgtatttatcgcgcggtttttgttggcgggaaatttggggggaggcgcgtttcgtcggaggaattcgggttttagtggttaattaataggcgtttcgtcgtgcgcgggcggtgcgcgttaggtttcgttttcgggcgcgcggcgacgtggggaagggcggggttggtatattggtgggtaggggcggggttggtacgttggcggtgaggggttcgttttgtcgtcgacgtttgggtttcgcgcggggaattgttgagtttttttttttttacgtcgcggggttggtcgggtcggaatatttcgattcggggttagttgcggtcgcggggttagtaggttcggaaagttttgtttttttggagcggaagcgggaatagcgggggcgcgtatcgttcgggcggggataatcggggggattcgaaaggtttcggaaaggggttcgcggggagaaacgcgtttagcgttcgcgtgattttttgtcgttagagtattttcgtaaggagacggagcgaaagggattaaattttagttagtagtttatttttacgttgtatttttaagatttgtatagagtaggtatttggtaaacgttaaatgaatattgtaatagtattcgttagcgatgttgttgtgtatggtgaaagtttgtagttgtataaagtttttttttgttaggtattgattttagtattttatatttggtaattaaatcgatttttttaataatttgtgacgtaagtatttaagggttatagttcgttatttgagttttttgatttaggtgtgtttttataggattttttaaattttagaaagttaagagattatgagaggtcgggcgtagtggtttacgtttgtaattttagtattttgggatgtcgaggcgggcggattatttgaggttaggcgttgaagattagtttagttaatatggtgaaattttcgtttttattaaaaatttaaaaattagtcgggcgtggtggtatgcgtttgtaattttagttatttgggaggttgaggtaggagaataatttgaatttgggaggtagcgtttgtagtgagttaaggtcgcgttattgtattttagtttgggcgataagagcgaaatttcgttttaaaaaaaaaagaaagaaagttaagaggttatgagaataaaaaggttttatttaaatttaagaaagatagtggaagatagataattgtttgtttttttatttagattgtgaaatttagattgtcggaaattagttataattaatagttgtatattggtaaaaatttatgtaaaattagttgtttgttttgtttttggagattgttttgttagaaggtttttttttgttaggtaagtaataaaattaatttaaaaaaaaaaggcgggggtcgggcgtagtggtttacgtttgtagttttagtattcggtatttcggggggggggcggaggtgggcggattacgaggttaggagatcgagattattttggttaatatagtgaaatttcgtttttattaaaaatataaaaaattagtttggcgtggtagtatacgtttgtagttttagttattggggaggttgaggtaggagaatggtgtgaattcgggaggcggagtttgtagtgagtcgagatcgcgtttttgtattttagtttgggcgatagagtaagatttttttttaaaaaaaaaaaaagaatattgttaaaggtggtatgtgttaagaaaaatatagtatgttttacgaatttgtattttatttttgtgtaggggttattttaattttggtatatgtgttatttaagtaagtatagtgaaattaattgtttgagataatatttgagagttggttttttttttttatcggtatacgtaaatatttttagagagtttgggggaatatgttgaaattaaatatgtagtaaaatttatatgtttatttatattaagtagaaagaatatagaatatagattataaatagttttaggttaaaatttgttattaaatgagtttatttttaaatttttggtttatagagttttttggattttagaattgtacgtaagaggttggttattttgtatttttatattatggatgaagttgaggtatagttgggttaagtaatttgtttatgattgtatagttaggaagtggtggagtttggatttaaatttaaggaagttggttttggagttttatgttgttaatagaaatattataatatttttaatttaatattattttattttatttagttattataattattttatattaggttgaattatgtgaaattgttaaaatttgttttttttaaaatttttttgagatagggtttggttttgttatagaggttggagtatagtggcgtgattttggtttattgtagttttaattttttaggtttaagtaatttttttattttagttttttgagtatttgggattataggttcgtaatattatgtttagttaattttttttttttttaattgaggagttttattttgttatttaggttggagtatagtgacgttattttggtttattgtaatttttgttttgcgggtttaggtaatttttatgttttagttttttgagtgttaggattattggtgtttattattatgtttagttaatttttgttttttagtagagatacggttttattatgttggtttgtttgattttaaatttttgattataagtgattcgtttgttttagttttttaaagtgttgggattataggtatgagttattgtgttcggtgttttgttagtattttaaaaattttttgtagagacgaagttttattatgttgtttaagttggatttttttggttttttggttgttttgttttgagatagggttttattttgttttttagattggtgtgtagtagtgtagttttagtttattataatttttattttttaagtttaagtaattttttttttttagttttttgaatagttgggattatcggtacgcgttattattgtttagttaatttttgtatttttagtagagataggattttattatgttggttaggttggttttaaatttttgattttaaatgatttttttgtttcggttttttaaaatgttgggattataggcgggagttattgcgtttagttaagttggatcgtttttgaagtataaatattaatatttaatttattttggtttaattgaatataacgttattttttttttgttgttgttgtttgtttttttggggatggagttttgttttgttatcgaggttggagtgtaatggtacgattttggtttattataattttcgttttttaggttaaggtaatttttttgttttagttttttgagtagttggggttataggtattaatatatttagttaagttttgtatttttagtagagatggggttttattatgttggttaggttggttttaaatttttgatttcgtgattcgtttatttttgttttttaaagtgttgggattatagatgtgagttattgcgttcggtcgatgttatttttttatagggaggaaatggaggtttagaggggatgcgttagttgtaagaggttaagagtttgggttttgggttaaatggagaattgagttttgattttagttagttaagtagataattcggagtaattaatatttttttgaatttgttttttcgtttttgataaggatagtagtatttatgggttaaattttggaggttatagttagatgttttttataaattttattaaaagataagagaatatatgtattatgtggggatatttagatttttagaattggtatgaatgttatttggaattgaagatatttgagagttaatagatgtagaaagatgtcgttttaaagttttttttatgcgattaatagtagaaatttttgggagtgaagttgtcgtaaattttttttttaggggagttttagtggttagaaaaaaagataaagattatttgtatttgtaaaaataaatatttttattttttttttgtttttttagaaatttatttgttttttttatggaaggtttttttttttttttttttttttattaaatggtatatataaagtagatttcgagatttaagaaaaaaaaagttgtataaatgttaaataatagttttttggatttattttttttttttgtgaatttttgtatgtatatttgaataaaagtttgtttttttttttttttttttttgagatagggttttattttgttgtttaggttgattttttagttttagttttttaagtagttaagattgtaggtgtgcgtttttatattttgataattttattttttgtagagattgggttttgttatgttgtttaggtcggtttttaatttttgggtttaagtttttttttttatttggttttttaaagtgttaggattataggtttgagttatcgtgttcggttttaaattgtttttagtttgtagtgtttaattaatatatatattttatgattatatatgggttattttgaaaattgaataaaaatattttttttttatatgtattttttttttaaatggttatatttagtaaattgtataataattaatggagttgttttggtttaggagatgtggtaggaaagtattaaggtagtaaatatattaggtgtttgggaatttttggtttattggttaagagttttgtatttaaagtttgtgtttatattttagttgagttgtttattaaattgtacgagtttgttgggtaagttatttagtttgtgttttagtttttatatttgtaaaatagggatgatattaatattattttttttatgggttgtgttaagtattgagtgaaagggtattatgaagtttttagtttagtgtttggtacgttatacgtatttaataaattggatagttatataaataaattattaattggttagggatagtggtttatatttataattttaatattttgggaggttaagatagaaggatgatttgaggttaggagtttaagattagttagtaatatagtg

SEQ ID NO: 184 - DNA, 1631 bp, Artificial Sequence
  chemically treated genomic DNA (Homo sapiens)
ggatttagaatatggggcggatttaggtagcggcgggaattaggcggattcgtttggatcgaagttttcgttaggtatcgaagtcgtgaagtcgtttgcgtagtaaagggagttttcggggggcgttcgagattttggtgtcgttcgggggtcgttggtagtcgcgttcgttgtttttcgttcggtgatttagtcggtatttttggcggggttatgggggttagaggatagcgcggggggcggcgagcgcggttgttaagttttttaaggtttcggagggataggatttgggcgtattttatcggttgttatggtaacgtagcgttttagtttttcgcgtttcgcggtggagggaggcgtagttaatcggaagcggcggagttttcggggattttttttttttcgttttacgtcgtgtgtgggcgggggttaggaggtgcggggcggaggcggagcgtgggtcgcggagattcggcgttcgtaggaggtttggtgcgcggcggggttgtacggggttattttcggagtagtattgcgagtagcggcgcgatagtgcggggtttttttttttttagaagagacgttatttatataaatttgatttttacgtggggcgcgggattttgcggggttttagtcgtaggcgtttttgttgtttttttcgggcgggtgggttggagaagaagtttacgcgggattttttaaaacggcgtatagggggattttagggttttatggttatttttttggatttttcggaggcgttgtttagttatttttagtcgttttgatgattcgtcgtgggtttttttaggagattcgaaagtttagggcgggttgtgtgggtaatatttttgtttaggttttcggagggttttacgtggttgtttttggagtattttagagcgttagggttgcgggaaggggcgggtgtgtttttggaaatatgagcgtttgttagtattagtgtttggatagggttggggataaattagtttatgtcgcgtatatcgaatttatgcgtttgagtgagggtgggtgtgttggggagtgcgtttaagtggatagtgtcgtatagtaatgtttacggggagttttaggagagttcggttatttttgcgtaggataattttttttttattattcgagtttcgtgttcgcgggtaggattttttcgaattggggttgtgtgtttagaaatacgtatatgggagcgtttagtttaaagttttagggtttttgggattcgcgtgttcggggtcggggttttaggtgggtataggtgggagggcgaatttgcgggtagggtgggttttttttcgcgggtttagtatttgtgcgtttttagtttaggtgcgcgggaggaaggtagcggtttgtcgcgtagagttttgcgcgttcgcgaggtggcgttatagtcgtagtagcgttcgtcggttcgggtcgttttagataagagtgtgcggaaagcgcggcggggttgagacgcgattaggacgcggggaggacggattagtaggatagatcgatcgggggttcggcgggcggagggtagcgtagttacgttttttttggattcgtcgttagtcgggttcggggttttcgatatgttttttaggtgggttttcgag

SEQ ID NO: 185 - DNA, 1631 bp, Artificial Sequence
  chemically treated genomic DNA (Homo sapiens)
ttcgaggatttatttggggggtatgtcgaaagtttcgggttcggttgacggcggatttaggggggacgtggttgcgttgtttttcgttcgtcgggttttcggtcggtttgttttgttggttcgtttttttcgcgttttggtcgcgttttagtttcgtcgcgtttttcgtatatttttatttggagcggttcgggtcggcgggcgttgttgcggttatggcgttatttcgcgggcgcgtagggttttgcgcggtaggtcgttgtttttttttcgcgtatttgagttggaggcgtatagatgttgagttcgcggggaggggtttattttattcgtaggttcgtttttttatttgtatttatttgggatttcgatttcggatacgcgagttttagaaattttggggttttgagttgagcgtttttatgtacgtatttttaggtatatagttttagttcggaaaagttttgttcgcgagtacgggattcgggtggtgggggagaggttattttgcgtaggagtagtcgagtttttttggaatttttcgtagatattattgtacggtattgtttatttggacgtattttttaatatatttatttttatttaggcgtatggattcggtgtgcgcggtataaattgatttgtttttagttttatttaggtattgatattaataggcgtttatgtttttagaagtatattcgttttttttcgtagttttagcgttttgggatattttaggggtagttacgtagggtttttcgggaatttgggtagaggtgttatttatatagttcgttttgaattttcgggttttttaaaggaatttacgacgagttattagggcgattggaagtggttggatagcgttttcggggggtttaaagaagtaattatggggttttagaatttttttgtacgtcgttttgaagaatttcgcgtggattttttttttaatttattcgttcgaaggaaataataggggcgtttgcggttgggatttcgtaaggtttcgcgttttacgtgaaggttaggtttgtgtgggtgacgttttttttgggagaaaggggatttcgtattgtcgcgtcgttgttcgtagtattatttcggaagtggtttcgtgtagtttcgtcgcgtattaagttttttgcgaacgtcggattttcgcggtttacgtttcgttttcgtttcgtattttttgattttcgtttatatacggcgtggagcgggggggggggggttttcgagaatttcgtcgttttcgattggttgcgtttttttttatcgcggagcgcgaggggttggggcgttgcgttattatggtaatcggtgaggtgcgtttagattttgttttttcgaggttttggagagtttagtaatcgcgttcgtcgtttttcgcgttgttttttggtttttatggtttcgttagaggtatcggttgagttatcgggcgaggggtagcgggcgcggttattagcggttttcgagcgatattaaggtttcgggcgtttttcggaggttttttttgttgcgtaggcgattttacggtttcggtgtttggcggaggtttcggtttaaacgagttcgtttgattttcgtcgttgtttgagttcgttttatgttttggattt

SEQ ID NO: 186 - DNA, 9254 bp, Artificial Sequence
  chemically treated genomic DNA (Homo sapiens)
tgggggaaattgattttatgatttaattatttttatttgattttatttttgatatgtgaggattattataatttaaggtgagatttgagtggggatataattaaattatatgagtggatatgtaatatgagtgagaaataattttgtgattgtaatttagtaagatttttggatggttaatatagtataatttagagtatatggaggtgtgtatttttagttttttgattttcgggtatttagtaggattgtatttttttgtattttttaagtaaggtatggttatgtgattaattttagttaataatatgtaaatataataaaaagtgttatttttaggagggagtttttaaagttaatgtgagtttattatgtttttttttttttgttaaattgatgcgatgattgttgaagtatgtattaagatgaaattttttttagattaggtttttaaatgagtatattaagtagagtttcgtgaagttgaatatgtagtatgagtaaaatataaaatttatttttaagttattgaaattttaggattgtttgttatggtagtataatttaaattattttgatttatataaaaattggtttttagatatgggttagtgtaataataataataagtataataataataaaattaaataattatttagagggcgataattaagaatattgttattagaagttgaagggatggtgatttgtttggtaaatatattatttgtgataatgtagaaggtagattatgaatttgatgaattaaagaaaaggattgtaaaatagagagtgagtagtgtgtgttggtggttgttggatgtattttgaaagttattataagttatttaaagatgaatttagaaaaatttggtttgtttgtaattaggaatgaaatggaatagagaaaatttataaatttagggatttatatcgttagaagaggtaattgttttttagtttcgattggtaaaatataaaattaagaaatatttttagtaagaaaggatttggaagaaattaagttttgaagtaaggattaagttataaagtatgaatttattattaaaattttaggataggaggtcgaggaggacggattatttgaggtcgggagttcgagataagtttgattaatatggagaaattttgtcgtttttaaaaatataaaattagtcgggcgtggtggcgtatgtttgtaattttagttatttaggaggttgaggtaggagaatcgtttgaattcgggaggtagaggttgtagtgagtcgagattgtgttattgtattttaattagggtaataagagtgaaatttcgttttagaaaaaaaaaaaaaaggattaattaagattttatttagtatatatttttaattggataaaatggttttgggaaaaggaagaaaggtttaatttttttattaaaatttaataagtttaaagtgtttaaaattaagtgaagagtaagagagtgagacggtaaaagagagatagaggagttaataggtaggagagtaggaaagtaaagagatatggtaaattaaagaagtatgtttggaaaagaattttgtggttattgttatatggaatattttatattagatagataagaagtttatttatatatatttaagatttaatgttattttgtatttttttaatttttaaaagtttatttaaaagtatattttttaatgtttgttttagttgtggaaaaggaagatttttcgagggtaaatttaggagttatggaaaataatgggtagggtagtttggtgttgtgattggatgggtttttaaggttgttttttttgaataaagaatgagggaattttattaggggaaggagagtagattaaatatttggtgaatagaaagggagatagagtttttagtgttattttttaaatatttttggagagttttttgagatatttggtaggattatagtgatttaaagaggtatggttatgtgattgttttggttaatgatgtatgggtagaagtgatgtgtgttataagtggatgttttgatagttatgatgtttcgagttttttttttatagttaggatagttgtgaaaaggggtattaatacgaggttttttttagtttgagttttttagtgattataatgagtagagttattttgttaatttataacggttatgtagtagaaatgattaatttttattggaataagttattgatatgttagggttgtttgttagggtagtataatattgttttttttgatagaattgggagtgagagataaggttggagagagaaggagttggattgtgaaaagttttttttttaaggtataggaatcggaatttttttgattgtaaggaaaagttaatgaaggtttttaagtaggggcgttaatatgaatagatttgttatttttttggatgaaatatgttattttttaatataaggagaagattagtttattaaattatatgaggtagagaggaatatatagaattttaggtaaaagatatatatttatgtaaagttttaagttttgaaatttttaaatataagagttttgaacggagttatagttagaggattaggtaagaaaattttttttatgttataagcgttattttttttgtagataattaatattttataagaaagtttgttagagtagagaaaatataaaggaatgtaatatagatttgaggttaatttttagttgtttgtgtgattttaataaagatatttaatttttttgggtttatttttttatatgttaaatttggataataatatatgttttttaagatagttgtggggagaaaatagcgtatttaaattgtttaggagaatgtttggtagataataagtgtttaatatatgaaattgatttttattattgttattaaaaaatatttagaatattaattttttgaatataatagaaaatgatttagggtaatagatagaggagaatgttttttttttgaggaagtaattggattttgttattattgtatatttatttattttattttttttttagtttagtgtttggtttatagtaggtttttagttattttttgtagattagtgaaagttaggtgagtgttcggagtgaagaaaagttggtaggttttttattgatattagttgttgttggtttttgaatatttaaagtcgtaaatattttagggttgggggtaatgaatttaaggttgaattttaagtttagaagtagcgaagtttgaatttagaatttaggaatttaaattgttgtaggtttaattttaagttttagttttagatagaggtttgggaaagatttgatttttaattcggtttttttttttttttttttttcgatgttttttataggaaagtatatttggttttgttaaatcgtatttttatattttggtattttatttaggttttgcgaggatggaaattgcgaggtaggggagggaagcgggttgtttggttattatttttttagtgttgtaggcgattttgttatattaatttttggtagtttagtgaggtggacggtatcggttttatttgtagatgagggaaatgaagttcggaggagtttcgtgatttgtttgttttatattgtggtagtttggttacgaaagaattaggattttcgatttcgggattttttttattatatattttcgtttttaaggggtggggggcggggggagaataaaataatcgcggaaaaggaattatttatatgtgtttagcgttttttagaggttatttaggatatgcgtttattattcggtcgggagtgtagagatttgaagtttaggttttatttcgggtttcgagtattattgcgtgattttatgcgagtgttcgtcgttttttgggtttgttttttcggaagtaattcggcgcggatggagtgtgtgtgtgcgcgcgcgcgcgcgttatgttgtgcgtgttgtgttaagcgtgtgcgtgttgttcgggggcgggagggggagtagattaatatcggggtttttcgagtttcggatcgtttatacgtttgtttttatttggattttgttatttattaattgcgtttattataaaaattgttttttcgaggtaaagttgtgaattttcgcgtttttttttttacggtttcggaggatgaagtggggtgtaacggagatttagttgagcgtttagtttcgggtaatataaatttttcggtttttacgagtagttagacgatttcgcggatcgtcgtttttgaatttgatcgagatgtaaatttcggagtgtttttaacgtggggggtcgattttcgggagatcgtttttaaatttaagtttttttaggttcgtttttatttgggattttatagagttattttaagggcggtattttcgttttttcggaagtgcgggggggtggtagcgtatttggatttttagtttttagtttcgcgcggtggcggtcgtcggtggatgatttcgggttttataagtggggaaataataattatttttcgttcgtatttttggtttaaaataattggttaggttttttggtttttcgggtttttgtatttttcgtattttcgttcgtagtcgtgaatttgagtttttttttattagaggttgcgagcgttcgttcgttcgcggtagttatcgttattagatagttaaattttaagacgttagtttataatgtatcgggcgggtcgggaaaaacggttcggggaggggatcggggaagagagggtcgagaggcgtgcggtaggggggagggtaggagaaagaagggttcgattgtaggagggtagcggagtattattttatttcgtgagttttcgcgggtttagagaagaattttttagggtggagtttttatggtgacgggcgggttcgtttttttgagagcgacgcgagttaatgggaaggttttggggtgatattatgggttatttttaggggttgattggtagtagataagtgttgagttcgggttggataagggtttagagttgtattgagtgtggttgaagtagcgaggcgggagtggaggtgcgcggagttaggtagatagatagatatagttagttagttaggtcggtagtatagttcgaattgtaaattttattttttttttattttttttttaattgtttagagttagcgtttgtggttttcgggttggtgtttcgggagtgtttagagagtttggtttttagtcgttttcgggaggagagttttgttgtttaggcgttgttgatagcggcggaaagtagcggtatttacgcgttcgtcgggggaagtcggcgagcggttgtagtagtaaagaattttttcggttgggaggatcggagataagtggtagagtttcggagttaatttttgtaagttttttttgcgttttaggtttttttacggcggtaaagattagaaggcggcggagagttacgtaagagaagaaggacgtgcgtttagtttcgttcgtatcggttgttgaatttgggcgagcgcgagtcgcggttgtcgggcgttttttttttttagtagcggaggaggggataagtcgtcggagttcgggcggttaagattcgtcgtcggtcggttattgtagggttcgtattgattcgtttcgcggggagagtcgttgttttgggaagtgagttcgtttgcggatttcgaggaatcgttgcgtacgaagagcgtttagtgagtgatcgcgattttttaaagtcgggtagcgcgcgcgagtcgataagtaagagtgcgggaggtattttaattaattttgcgttttttggagcgagttggtgaggagggcgtagcggggacgatagttagcgggtgcgtgcgtttttagagaaattttttttgttaaaggtttcggggggcgcgggtgtttttcgtttgttatagttttgttgcggtttcgaaatttgtgcgcgtagtttaaattaattttacgtgaagtgacggattgttttatgattgtaaagatggaaacgattttttatgacgatgtttttaacgtttcgtttttttcgttcgagagcggattttatggttatagtaattttaagattttgaaatagagtatgattttgaatttggtcgatttagtggggagtttgaagtcgtattttcgcgttaagaattcggatttttttatttcgttcgacgtggggttgtttaagttggcgtcgttcgagttggagcgtttgataatttagtttagtaacgggtatattattattacgtcgatttttatttagtttttgtgttttaagaacgtgatagatgagtaggagggtttcgtcgagggtttcgtgcgcgttttggtcgaattgtatagttagaatacgttgtttagcgttacgtcggcggcgtagtcggttaacggggtaggtatggtggttttcgcggtagtttcggtggtagggggtagcggtagcggcggttttagcgttagtttgtatagcgagtcgtcggtttacgtaaattttagtaattttaatttaggcgcgttgagtagcggcggcggggcgtttttttacggcgcggtcggtttggtttttttcgcgtaattttagtagtagtagtagtcgtcgtattatttgttttagtagatgttcgtgtagtattcgcggttgtaggttttgaaggaggagttttagatagtgttcgagatgttcggcgagatatcgtttttgttttttatcgatatggagttttaggagcggattaaggcggagaggaagcgtatgaggaatcgtatcgttgtttttaagtgtcgaaaaaggaagttggagagaatcgttcggttggaggaaaaagtgaaaattttgaaagtttagaattcggagttggcgtttacggttaatatgtttagggaataggtggtatagtttaaatagaaagttatgaattacgttaatagtgggtgttaatttatgttaacgtagtagttgtaaatattttgaagagagatcgtcgggggttgaggggtaacgaagaaaaaaaataatatagagagatagatttgagaatttgataagttgcgacggagagaaaaaagaagtgttcgagaattaaagttaagggtatttaagttggattgggttgcgttttgacggcgtttttagtgtgtacgagtgggaaggatttggcgcgtttttttttggcgtggagttagggagcggtcgtttgcgggttgtttcgttttgcggacgggttgttttcgcgcgaacggaacgttggatttttcgttaatattgattaagaattgtatggatttaatattcgattttatttagtattaaaggggggagggggagggggttataaattgtaatagagattgtagattgtttttgtagtattttttaagaatataaagcggggggagggttggggaggggcggtaggagggaggtttgtgagagcgaggttgagtttatagatgaattttttttggtttgttttcgttaattgtgtatgtatatatatatattttttaatttgatgaaagttgattattgttaataaatagttttatgtttttgtaagttattttttgtttgtttgtttgggtattttgtttagtgttgtttgtaaataagagatttggagtattttgagtttattatttgtaataaagtatataatttttttatgttttgtttttgaaaattttagaaaggatatttaagaaaatataataaattattggaaagtatttttttaattttttttttgtattatttgtagatattagttatttaggtggagttgaaagagttaagaatgtcgattaaaattatttttagtgttttttattattaagtagtaaaaattgttttttattagattttagaaataaatgtatttgatgtatttgatgttatggttaggttatatttttttttttttagttatttatatggaattgtttattaaaggatagtgcgatgttttaggaggttggaggaaggggggttgtagtggagagggatagtttattgagaagttaaatattttaaagtttggattgtattaagtggtatgtgttgtgattatttataatgttagtagaaattttataataggtgtttatttttaaagtaggaattggtggtagattttataaaagatgtatttttttaatttggaattttttttttgataatttttagataaaaagatggtttttgtttatgaatatttataatagtatttttgttataataaatgtatttaaatattaataatagattttgaattgtttttttttattatttttttttttttaagttatatattgaagtttttatttttagttgttgaggttaatattgttgtaatttgaagtgatttgaaaattaagaagtaaagaatttaggaagagttaaattagaagttgtgatttgaatgaaatagttttttaattttattaattttttttttttttttttatttttatttttttttttattattttatttttaaataaatttttatgtttatggaaattaatagtttagtattttgggtttgtttgtagtttattttttaatttgtttttaaaataattaattttgtttaaatatagaataagttttaaaagatagtaatttaatattatggaaaagatttataagagaaaatatgaattagtattaatttaatgattatatgcgtaaattaaattttagttttggggaaatgggaaatttgaattttatttatagatataatttaggagattaataaggtagtgtttaataagggaataattttttgtttggttgttttttatattaagagttagtgtgattattaggtagtaaaagtaatttgatatttaggaatattttataaattattaattgagttagggttgtttgtttattagtagtgttttagtatttagtaggtttgggagtgttaatattttgtttgtggttgtaaatttaaatatataaagagtttttttttaggagtatatttaggagtggaagagattggataggtttgttagtttcggattttttgtaataatattttttgaataaagggttattgggagtagagtttagtttgttaaattgaatttgtcgatgttagtaattcggaaggtgagatgattttgattatatgtagaaatagtagagggataataaagtattttggggtggggttttgtggaagttaaataagagttaattagaaaaaataagtaggttggggaattaattatttgtaaagg

SEQ ID NO: 187 - DNA, 9254 bp, Artificial Sequence
  chemically treated genomic DNA (Homo sapiens)
tttttgtaggtaattaattttttagtttgtttattttttttagttggtttttgtttagtttttatagagttttattttaaaatgttttattgtttttttgttatttttatatatggttaaaattattttatttttcgggttgttgatatcggtaaatttagtttggtaaattgggttttgtttttagtaattttttgtttaagaagtgttattataaaggattcgaagttaataagtttgtttaattttttttatttttagatatatttttaaggagaaattttttgtgtatttggatttatagttataggtaggatattagtatttttagatttattgggtattagaatattgttaatgagtaaatagttttgatttaattagtggtttgtgaaatatttttggatattaaattgtttttgttgtttgataattatattggtttttggtatgaaaagtaattaagtaaaaaattgtttttttgttaagtattgttttgttgattttttaagttatatttgtaggtagaatttaagttttttatttttttagagttgaggtttgatttacgtatgtaattattgagttagtattagtttatgtttttttttgtgaattttttttatagtattagattattattttttgagatttattttatatttaaataaggttgattattttagaaataaattaagaaataagttatagatagatttaaaatgttaaattgttagtttttataggtataggggtttatttgggggtgaggtagtagagagagagatagagatggagaaagagggaaagaattaatgaaattgggagattgttttatttagattataatttttagtttgattttttttaaattttttgttttttaatttttaaattattttagattgtagtaatgttaattttagtaattaaaaataaaaattttagtatataatttgggaagaaaaaagtagtaaagggaagtaatttaagatttgttattggtatttgaatatatttattgtgataagaatgttgttataaatatttataagtaaaggttatttttttatttaggaattgttaaagagaagattttaaattggaaggatatattttttgtaaaatttgttattaatttttgttttgagaataagtatttattgtaaaatttttattaatattataaatggttatagtatatgttatttgatataatttaaattttgaaatgtttgattttttagtgggttgtttttttttattgtaatttttttttttttagttttttgaaatatcgtattattttttggtaagtaattttatatagatagttgggggaggaggagtataatttgattatagtattaggtatattaggtatatttatttttaaagtttaatagagaatagtttttattgtttaatagtaagaagtattgagagtgattttaatcgatatttttaatttttttaattttatttagatagttagtatttatagatgatgtagaaaagaggttaggggagtattttttaatagtttattgtatttttttaaatattttttttggaatttttagaaataaaatataaaaaaattatatattttattataaatggtaaatttagagtgttttaaattttttatttataaataatattgggtaggatatttaaataaataaataagaaataatttataaaggtatgaagttgtttattgatagtaattagtttttattaaattaaaaaatatatatatgtatatatatagttaacgaaggtaggttagaaagagtttatttgtaggtttagtttcgtttttataaattttttttttgtcgtttttttttaatttttttttcgttttgtgtttttaaggagtattatagaagtaatttatagtttttattgtagtttgtaatttttttttttttttttttttaatattgaatgagatcgaatgttaggtttatgtagtttttggttaatgttaacgaaaagtttaacgtttcgttcgcgcggggatagttcgttcgtaaagcggggtagttcgtaggcggtcgttttttggttttacgttaagggagggcgcgttaagttttttttattcgtgtatattgggggcgtcgttaggacgtaatttagtttaatttggatatttttggttttagttttcggatatttttttttttttttcgtcgtaatttgttaagtttttaagtttgtttttttgtgttatttttttttttcgttgttttttagttttcgacggtttttttttaaaatgtttgtaattgttgcgttagtatgagttggtatttattgttaacgtggtttatgattttttgtttaagttgtgttatttgttttttgagtatgttggtcgtggacgttagtttcgagttttgagtttttaaggtttttatttttttttttagtcgggcgattttttttagttttttttttcggtatttggaggtagcgatgcggttttttatgcgtttttttttcgttttgattcgtttttgggattttatgtcgatgggggataggggcggtgtttcgtcgggtatttcgggtattgtttgaggttttttttttagggtttgtagtcgcgggtgttgtacgggtatttgttggggtaggtggtgcggcggttgttgttgttgttggggttgcgcgggaaaggttaggtcggtcgcgtcgtaggagggcgtttcgtcgtcgttgtttagcgcgtttgggttgaagttgttgaggtttgcgtagatcggcggttcgttgtgtaggttggcgttgaagtcgtcgttgtcgttgttttttgttatcgaggttatcgcgggagttattatgtttgtttcgttgatcggttgcgtcgtcgacgtgacgttgggtagcgtgttttggttgtgtagttcggttagggcgcgtacgaagttttcggcgaagtttttttgtttatttgttacgtttttggggtataggaattgggtgggggtcggcgtggtggtgatgtgttcgttgttggattggattattaggcgttttagttcgggcgacgttagtttgagtagttttacgtcgggcgaggtgaggaggttcgagtttttggcgcggaggtgcggttttaggttttttattgggtcggttaggtttagggttatgttttgttttaggattttggggttattgtagttataaggttcgttttcggacgggaggaacgaggcgttgagggtatcgttatagaaggtcgtttttatttttgtagttatagaatagttcgttattttacgtgaggttagtttgggttgcgcgtataagtttcggggtcgtaatagggttgtggtaagcgggggatattcgcgtttttcggagtttttgatagggaaagtttttttaagagcgtacgtattcgttggttgtcgttttcgttgcgttttttttattagttcgttttagggagcgtagggttaattaagatgtttttcgtatttttatttgtcgattcgcgcgcgttattcggttttgaaaagtcgcggttatttattgagcgtttttcgtgcgtagcggtttttcggagttcgtaggcgaatttattttttagagtagcggtttttttcgcggagcggattagtgcggattttgtagtggtcggtcggcggcgggttttggtcgttcggatttcgacgatttgttttttttttcgttgttagggggagggggcgttcggtagtcgcggttcgcgttcgtttaagtttaataatcggtgcgagcgaagttgagcgtacgtttttttttttttgcgtggtttttcgtcgttttttggtttttatcgtcgtggagaagtttaagacgtaggaaaggtttgtaaaagttggtttcgggattttgttatttgttttcggtttttttagtcgggaaagttttttgttgttgtagtcgttcgtcgatttttttcggcgggcgcgtgggtatcgttgtttttcgtcgttgttaatagcgtttgggtagtagggtttttttttcgggggcggttggagattaggttttttggatattttcgaaatattagttcgggagttataggcgttagttttgggtagttagagagaaggtgaaaagaaaataagatttgtagttcggattatattgtcgatttggttggttggttgtgtttgtttgtttgtttgatttcgcgtatttttattttcgtttcgttgttttagttatatttagtgtaattttgagtttttatttagttcgagtttaatatttatttgttattagttaatttttaaaaatagtttatgatgttattttaaggtttttttattggttcgcgtcgtttttaggggggcgggttcgttcgttattatggagattttattttagaagatttttttttgggttcgcggaggtttacgggatgaggtaatgtttcgttgtttttttatagtcgggttttttttttttttatttttttttttgtcgtacgtttttcggttttttttttttcggtttttttttcgggtcgtttttttcggttcgttcggtgtattgtgggttgacgttttggggtttgattgtttagtgacggtggttgtcgcgagcgggcggacgttcgtaatttttgatggaggggggtttaagtttacggttgcggacggggatgcgggggatgtagggattcgggaggttagggaatttggttagttgttttgggttaggggtgcgggcgaggggtggttgttgtttttttatttgtggggttcgaagttatttatcggcggtcgttatcgcgcggggttggaggttgagaatttaagtacgttgttattttttcgtattttcgggggggcgggaatatcgtttttaaggtggttttgtgaagttttaggtgggggcgagtttaaggggatttaagtttaggggcggtttttcgagagtcggttttttacgttgagaatatttcgaagtttgtatttcggttaagtttaggagcgacggttcgcggggtcgtttggttgttcgtagaagtcgagagatttgtattgttcgaaattggacgtttagttgagttttcgttgtattttattttatttttcgggatcgtgggggaaagggcgcgggggtttatagttttgtttcggaggggtagtttttatagtgggcgtaattggtgggtaatagggtttagatgggaataagcgtgtaggcgattcgaaattcggggaatttcggtgttagtttattttttttttcgttttcggataatacgtatacgtttaatataatacgtataatataacgcgcgcgcgcgcgtatatatatattttattcgcgtcgagttgttttcgggaaaataagtttagaaggcggcggatattcgtataaagttacgtagtagtattcggagttcggggtagaatttggattttaaatttttgtattttcggtcgggtggtgggcgtatattttgggtagtttttaggaagcgttagatatatgtaagtggtttttttttcgcggttattttatttttttttcgttttttattttttagggacgaaagtgtgtggtggaaagaatttcgaagtcgggaattttggttttttcgtggttaggttattatagtgtgaagtaagtaaattacggaattttttcgagttttattttttttatttgtaggtggggtcggtgtcgtttattttattgggttgttaggagttagtgtgatagggtcgtttgtagtattagggaggtggtggttaaatagttcgttttttttttttgtttcgtagtttttattttcgtagagtttggataggatgttaggatataagagtgcgatttggtaggattaggtgtatttttttgtgagaagtatcgaggggaggaggggagggggaatcgggttagaagttagattttttttaagtttttgtttaaaattggggtttgaagttggatttgtagtagtttaagtttttaggttttaaatttagatttcgttgtttttgaatttggaatttagttttgggtttattgtttttagttttaaggtatttgcggttttgagtgtttagaaattaatagtagttggtattagtgggaaatttgttaatttttttttatttcgggtatttatttagtttttattgatttgtagagggtaattgaaagtttattgtgagttaggtattgagttggggagggggtggggtaggtaggtatatagtgatgataagatttagttgtttttttaaggagagaatatttttttttgtttgttgttttgaattattttttgttgtatttagggagttggtgttttaaatattttttaataatagtaataaaaattagttttatgtattaaatatttattatttgttaggtatttttttaagtaatttaaatacgttgttttttttttataattgttttgagagatatatattattatttagatttaatatgtgaggaaataggtttagagaggttaagtatttttgttgaggttatataggtagttggaaattgattttaggtttgtgttatatttttttgtattttttttattttggtaaatttttttgtggagtattagttatttgtagaggaaatagcgtttgtggtatagaagaaatttttttgtttgattttttgattgtaatttcgtttagagtttttgtatttagaaattttaagatttaggattttgtataaatatatattttttgtttaaggttttgtgtgtttttttttgttttatgtggtttagtaggttgattttttttttatgttgagaaatagtatattttatttaaaaaaataataaatttgtttatgttaacgtttttgtttggaagtttttattggtttttttttataattaggagagtttcgatttttatgttttggagaaggggttttttataatttaattttttttttttttagttttattttttatttttagttttgttaggaaaggtagtgttatgttgttttaataaataattttaatatattagtggtttattttagtgaaagttggttatttttgttatatgatcgttgtaggttggtagggtagttttgtttattgtagttattaaagggtttaggttgaaggaggtttcgtgttgatatttttttttatagttattttgattgtggggaaggaattcggaatattatggttgttagagtatttatttatggtatatattatttttgtttatatattattggttaaagtagttatatggttatgtttttttagattattataattttattaggtgttttaaagggttttttaggaatatttggggaataatattaaagattttgtttttttttttgtttattaaatgtttggtttatttttttttttttggtggaatttttttattttttatttaagggaaataattttaaagatttatttagttatagtattaagttgttttgtttattgttttttatgatttttggatttgttttcggagagttttttttttttatagttaaagtaggtattggaaaatatgtttttaaataagtttttaaaagttggggagatgtagagtgatattaagttttgaatatgtgtaggtaggttttttatttatttgatatgaggtgttttatgtgataatagttataaagtttttttttagatatatttttttggtttgttatatttttttgtttttttgtttttttgtttgttgatttttttgttttttttttgtcgttttatttttttgttttttatttgattttgagtattttgggtttattgggttttgatgggagagttagatttttttttttttttttagagttattttgtttagttgaaagtatatattgggtaagattttaattgatttttttttttttttttttgagacggagttttatttttgttgttttggttggagtgtaatggtatagtttcggtttattgtaatttttatttttcgggtttaagcgatttttttgttttagttttttgagtagttgggattataggtatgcgttattacgttcggttaattttgtatttttaggagcgataggatttttttatattggttaggtttgtttcgaattttcgattttaggtgattcgtttttttcggttttttattttgaggttttaatagtaggtttatattttgtgatttgatttttattttaaagtttagttttttttaggtttttttttgttaaaagtattttttgattttatattttattagtcgggattgggaaataattgttttttttaacgatgtaaatttttggatttataggttttttttattttattttatttttgattgtaaataggttaaatttttttgagtttatttttgaatagtttgtagtaatttttagaatgtatttaatagttattaatatatattatttattttttgttttataatttttttttttagtttattaggtttatgatttgttttttatattattataggtgatatgtttattaaatagattattatttttttagtttttgatagtagtgtttttagttatcgttttttaaatgattgtttagttttattgttgttatgtttattgttgttattatattaatttatatttaggagttaatttttatatgagttaggatggtttaggttatgttgttataataaataattttaaaattttagtggtttaaaaataaattttatattttgtttatattatatgtttaattttacggggttttgtttaatgtgtttatttagaaatttagtttgaagaaggttttattttgatatatgttttaataattatcgtattagtttggtaggggaaagaaagtatggtgaatttatattggttttaaaagtttttttttaggaatgatattttttattgtatttatatattattggttaaaattagttatatggttatgttttatttaaagggtgtaggaaagtgtaattttattaggtattcggaagttaaagagttggaaatgtatatttttatatattttaggttatgttgtgttagttatttaaaaattttattgggttataattatagaattgttttttatttatattgtatgtttatttatatggtttggttgtgtttttatttaaattttattttgaattgtaataatttttatatgttaaaggtggggttaggtggagataattgaattatggggttagtttttttta

SEQ ID NO: 188 - DNA, 8244 bp, Artificial Sequence
  chemically treated genomic DNA (Homo sapiens)
ttttaaatatatttattatttcgacgggttataataatttttttggacgttaattttcggggacgttaaaatatattagtttcggcgggtttttttagatttatattatgtggtttggggttttagatgtgtttttttttaggttttggatagttttatatattttttttaggttttatagatttataggttattaattcgggttttttaattttaaagacgaagtttttggttcgtggtggtcgcgttgattaatttgtttggttttttaggatgtggatagtgttttttttatatttaggtattgtttttaaaataagtggaattttttcgtataattttgaatattaattttagggttttttaagtttattgtttttcgtatacgttcgttttatttcgcgtttttttattttattttcgcgttttttttcgtttattttagtatgggatatttgttgttgggtttcgtaaatttatttatattaatttgggttttttaaattttatacgttgaattttaagttttttatgatatttagtagggttggaaggttggaatttttagagtatgaaaattgttttttatatttttttttaaattcggttattatatttagagtatgttgaatttttttttgaattataaacgatttgttttttgattgtttgagttttataaaatggagggatttttttagtgattttttaaagttattgagaatgttgtgggtgtgtgagttataaagttttggggtattaacgtttatggttttatatgttgtttggttacgaattaggttttttaagatgtagatagtgttatttaggtttttggagtatattgagtagttattaggaggtgtttaagtgtgatttaggattttttaggtttttttaaattatatagggtttttcgggtttttttgggttatattaagtataaaaggattttttgggtagagtttatttttatttttgttatgttaggtgttgttaacggttttagtttttaaatatttcgagtattttttttgtattataatatattgattattaaataattttttgggttttaggagttttataataagaattttgtttttttaaaatttaggtattggtttgaaattttaacggttaggattatattggattttttttttggttttttatatttggatgttttggacgttgttttttaggttttttaggaatatttagtattgttttcggattataggatagtattgattttttgggttttaaataatttattgagttattttaaagttaagtaatattttttttaaatatattgtatattttttattataaaatttgaaaatttttaagttttaagatttaggaattttgaattttttttttttaaaatgtatatatggatttttaagttttttaaggattttgagtaatttttttagatttttagatttaaaaacgatttttttggagtttttaaattgcggtattgttttttagttttttaaagtaaattgagatttttttttttttataaaataattgaggttttttttttttttaatattgatttatgagttttttgattttatggtttttgttttgggtttttttatatttagaaaatgttttatggatttttaaagtatattaaaaaatgtttttgggttttaagaaattttaggtatggaaaaatttgcgatttataagttttttagttattaattaggtttttagaaatttagatattaaatttttattgggtaatttttatgtgttttaaaaatttgaaatgtgttttattggggtttttttaaatgtagacgatatttaggaaaatatatagttttttttttatttattaaaaataagttaatggaaattatttaaaaattagtatagaaaaataatattgattttatatttttttattttttattttgttttttttaaatgtattgattatattttaggtttttttaaaatttagatagtgtttttttttatttttgaagggtgttaaaatttttttttgaagttatagtaattatgaaggttatttttttttcggttgttgttagcgtttaggttattaatttatatttttaagatgtgaaaattaattttagtttttttttaatatattaagaatgtgtttggatttttaaaatgtgttttttgtttttatttgttaattttacgtaatatggttttacggtaaaatttttaattttatatggagaattttttttaattatttttttttataaattggttttttaagttagttggtttttatttgagatttttttttttatgtttttaattgtatggagtaattttttttattttttaaatttgtaatttatttttttggagtttcgagtttagttattaattacggtttttatattaacggagttttcggggtttttttttttaggatatttattcgttaagttcgtaaggtagaaagaattttgttttgcgttttttaaaatttgggtattgttttcggttcgtcggttatttattgtagtttttttaatttcgcgtatagcgggtattggtttcgggtttttttgttttttacgaagtttttagagtaattcggatttgggaaatttttttttagcgttgtttaaatatatttgggtcggtcgcgcgtttttaggacgtggatagggagggttttttcgtgtttaggaaagcgatcgggtattgtttttagttttttttaaatttgggtattgttttcgggttttttaacggattgggcgttgttttcggatattgaggattggtttcggggtttcgtttatttttagtagcgtttatcgtttgttatagagcgttcgatcgttcgttgtttgagtttttggtgcgttcgcggacgtagtttttagtttcgcggtgagtttttcgtcgcgtcgatttttttcgtttttgcgtttttgatcggttttcggttcgtatttgttgttgtttcgtcggtgttggcgttcgttttcggttgtcgtcggggaggtcggcgtggggcgcgggatacggttgcggatttgcggttggcggttgcgttcgtttttgttgggcgtttcgaaattcgcgttattttcgtttgtttattgtaaagattttattcgtggggaaagcggttggagggttttaaagtggggcgggtagggggttggggcgagggacgcggaggagaggcgttttcgtcgggcggtaaagtgtttttagttcgcgggtttaggatttcgtcgggaggcgcgcgcggagcgcgggcgaagtgattgatggcggagcgaggggggcgaggggggttaggggggcgcgagatttcgtcggcggttttttttttttggttaggtttaggcggcggggggttggcggggtgcgggattttgtgcgtggtttttgatttggtaaaaattatagtgtttttttatatcgtttaaattttttaggagatggtttttttagatttttaaattatcgtggtggttttcgagatcgaattcgcgtttatgtaagtttaacgtattgaggacggggtaattattatttagatattttgggtgggtcgtaaaggcgagttatttagacgtatttcggtgagttcggttatgtaggtaggatttgagttgtgtttttcgttttgatttttttttttttggcggtcggagttttcgtaggttttaagtttggtttagattcggttcggcgtagtcggtttttcgcgcgtttcgtatttggcgggggtttcggggtttcggcgcggtatcggggggcgttcgggatttggttgaggttttaagcgtcgcgtggtcggttttttttgttggggtaggtggcggttgcgcgtttcgttcgagtttaggggtttttttagtcgtaataattagtaaggatttttcgatttagttttaagttatttgtatttgtatttagacggggcgtattcgtagtgtagttttttggtggggcgttgggagttcgtttgtttttgtttgttcggagattttagtttacgagtataggtcgttcgggtattttagaaattcgggatggggtttttgaattttttagaacgggtatttagtatggttttggcgttttgcggttttttgttttttatttagtttcgttttcgcgtattttttagtttttgcgatcgtcgttttttttttcggggttttagggtttttagttcgtatttttcgtttcgtttttggttcgggttgcgggggcgggtcgggggcggggcgagggtttcgcgggcgtttattggcgcgggcgcgaggttagcgaggttcgcgcgggttttgggtcgcgggttggcgcgattataagagtcgggcgtgggcgttcgtagttcgtttgtttttcggcggagttgcgtgaggttcggtcggtttcggtttttttttttcggtcgttttcgttttttggtttacgtttgttcgcgttttgtttattagcgtttttatcgggtaaggcggtttcgcgtcgacgtcgttcgttgtttcgttgttgattttcgtttcgggcgtcgttcgcggggtcgcgtttcgtcgggtttgcggatttttcgtcgttttttttttatttattttaattttttttattttcgtttcgttcgaggaggcggtttttttcgtaggtagttcggttcgtaggtcgtcggcgttgttatttttttcgcgttttttttttagtttttttttcggcgcgtagtttcgggtcgttttttttttcgcgttgcgtttcggagcggtttcggtgtcgttatcgtttgtttttttttcgaggttcgggttcgcgacggtagagggtttcgtcggtttaaatcgagttgggcgttcgcggttcgggtgtagtttttatttcgttttttagttatcgtttttttcggtttttcgacgtggcgttttttttttcgtttttttgtgtttttcgcgttttttttggcgtttggtttcggttttcgttttttttttcgtaatttttttttcgttttttttcgttttttttagtttttagttttcgatttttttttttttttacgttcgttttttcgttttcgtcgaattaaagtggattaattatacgttttttgttttttttcgtgttgttttttttcgttgtgcgtttgttcgtttttcgttgttttttttttttttcgtttttttttcggttttttttttttacgtttattttgttttttttattatttttgtttttttttatttttgatataatagttgattttatttttcgatattttttttttttcgaaaagtataatatttggttcgttttagttcgaagatagttcgttttttttggataattagacgaattttttttttttttttaaaaaaaagttattttttcgttttgtttcgtcgtatattcggttttcgcgattcggttagagcggcgttggtagaggagtgttcggtaggagggttaacgttcgttgttcggtttgcgatacgtagtagggaggtgggcggtagcgtcgtcggtttttaggtaagcggcgtgtgcgggtcgggtcggggtcggggttggggcggcgcgggtttgcgtcggacgttcggtttttttttcgttcgttttcggttcggggtttgcggggttcggcggggcggttgagttcgggggggaggaggaggaggaggaggaggacggacggttgcgggtttcgttttttgcgcggagtttcgcgtttattttggcggcggagttgggggtggggtgggggcgtcgggaagggtcgagggaggtgtgaggtgtttgtaggggcgatttttcggtcggtttgtgggtgtagggggtgtcgttttatatgtgtgattcgtgttttgcgggttttggttttcggggtgttgggtaacgaggaggggcgcggagtcgtagaagtttattttggtatgttgacgcggtgttagcgagatcgcgagaggaagacgggggtgggcggggttaggatggagaggggtcgagttggtaggagttatggtagacgttatattcgcgatattttttttatattttttttggttttgttcgtaatatttttaaataggagtttcgggagagggggagaggggttgttggtttgaggttaagaagggtagagttttcgattcggagagaggtcgcggtttttgtttagtgggtagcgtggaagtttttatataaggaggtgggaaggagattttttttttttttattgttttgtgtagagatgagtcgggggtgtaggatgggagtttatggtatttcgttacgggatggtttagggttttcggttgggggtgtaggagagaagagattggttgggaggagggagagggcgggagtaaaggcgcgggggagtggttagtagggagaggggtggggggtagggtggagttcgggttgggaggagtcggtttatatataaaagttgaggtattgattagtttgtaaattggatattagttttttttgtgaaagagatttttagtttttttttttttttttttttttttttttttttgttttagcgagttttttgttgagttgtaggtaattagggttgtggagtgaggattttcgttgttattttattttagtttgaggtagggtagtagggggtacggtttacgtttgggtttcgggttttgtagtcgttagttcgttgtttttcggatagtattttttttttttttttttttttgtttttgtttttatttggtttttgtttttttatttgttttttttttttttgtttttttttttcggttttttttttgtttagtttagggttttttttgggtttttatttgtttcgtatcgttgtatgttttttgttttgttttttgtcggttttttgattcggatttttaagtttagagtggtggggtttgttgcggaagcgcggcgagggttagagtggttagttggcggagtgtgtttttagaatttggaagggggtggtagagggggcggtgagaggattggttagggtttagttaaggagatgattaaggaggtttttagattttcggcgtagttgtttattagtttttagagagggtatgtaaagttgtgtttttgttttattgtttgtttagtcgtttatataatttattgtattaaaaatttttttgggtttgcggagcgaaggttggggttgttcgtttggagggttttattttttgtaggggtagggttaatttgttgtggtggttttcggttttttattttcgagtgggttaattcggttttgtggttttgtagtttgtggagggggtgtgttttaagattggtttttttttttagattgtagtttggggaatttggtgtcggattttttaggtggtttgagttggtttttttagtttttacggggagagtttggtagcgtaaatagggagatgttttggaggtttttggttttattggttcgatttgaggtttggaaaggaggttttgggcgtgtgtgtgtgtgtttgggggtatttaaggtagattggagttggagaattgggtgattgggaaaataaggtttttagagtatgggtggcgtggttgtgttaattattggagtttttgatttaggtttggtttagttgtagattggaaaggtggaaaagttagggggaggggcggggttggtttagtaggattggtttgttgttttgagggcgatggtttttttggattttttttgtttagttgggggttgtggggaggaagggattggtttttttggatgtatatgttttgtaggggtggggttgtttgttattttggttggcgttggaggtttgagaagtggcgatgtgacgttgggttggttttgtttttatggtgttataggacggaggttaggtcgggtgtttagtttgggtttttgtagttgtggatgtcgttgagtttttgtaataatgatcgtggagatggttatttttcgtgtaaaattattagtgttttttgtaaatggaaggaattgggttttttttgtgtgtttttggacgttttattttgtatatggttttgcgtttttatttcggtattatgatttgtgtgttatttttgtaataaaaataatgtttataggaaagtcgtgtttttaatttttaattgaatttgtaggttggtaaatttggtttgggaggggtatttttggtttggggtttggtttggttgtttcgtttacgttatttttttttcgtttttaga

SEQ ID NO: 189 - DNA, 8244 bp, Artificial Sequence
  chemically treated genomic DNA (Homo sapiens)
tttgggggcgggagagaagtggcgtgagcggggtagttaggttaagttttaggttagaggtgttttttttaaattaaatttgttaatttataaatttagttgaaaattgaaagtacggtttttttataaatattatttttattataaaagtaatatataggttataatgtcgaggtgagggcgtagggttatgtgtagaatgaagcgtttagaagtatatagaaaaggtttagttttttttatttgtaagaagtattagtaattttatacgaggggtgattatttttacggttattattgtaggagtttagcggtatttatagttgtaggggtttaggttggatattcgatttggttttcgttttatgatattatgggggtagggttagtttagcgttatatcgttattttttaggtttttagcgttagttaagatggtagatagttttatttttatagagtatgtgtatttaggaggattagtttttttttttttataatttttagttgagtagggggggtttaggaggattatcgtttttaaagtagtaggttagttttgttgggttagtttcgtttttttttttggtttttttatttttttagtttgtagttgagttaggtttgggttaaggattttaatggttaatataattacgttatttatgttttagaaattttgtttttttagttatttagttttttaattttagtttgttttgggtatttttaaatatatatatatacgtttagagttttttttttaggttttaaatcgaattagtaaggttaggggtttttagaatatttttttatttgcgttattaaatttttttcgtgggagttggagagattagtttaggttatttgggaagttcgatattaggttttttagattataatttggaaggggaggttagttttaggatatattttttttataggttgtagggttatagggtcgggttaatttattcgggggtgggaggtcgggagttattatagtaagttggttttgtttttgtagaaggtggaattttttaggcgggtagttttagttttcgtttcgtagatttaggggagtttttgatgtaataaattatgtgagcgattgagtaggtagtgggatagaagtataattttgtatgttttttttaaagattagtgggtagttgcgtcgaggatttgaaagtttttttggttatttttttgattggattttggttagtttttttatcgttttttttgttatttttttttaaattttaagagtatatttcgttagttggttattttagttttcgtcgcgttttcgtaataagttttattattttgaatttggaggttcgggttaggggatcggtagaaagtaggataggaagtatgtagcggtgcggagtaggtgagggtttaggaaaagttttgagttgggtaaggagggggtcgaagggaaggaatagaaagggaaggagtaggtgagggagtagagattaggtgggggtaggggtagaggaaaagaggggaggggggtgttgttcgagaggtagcgggttggcggttgtagggttcgaggtttaggcgtgggtcgtgttttttgttgttttgttttaggttggagtgggatggtagcgggggtttttattttatagttttggttatttatagtttagtagaaggttcgttggggtaggaggaggaggaggaagaggaggaggaggaagttggaagttttttttataggagaagttaatgtttagtttgtaggttggttagtgttttagtttttatgtgtgagtcgattttttttagttcgggttttattttattttttatttttttttttgttgattattttttcgcgtttttgttttcgttttttttttttttttagttagtttttttttttttgtatttttaatcgggagttttggattatttcgtagcgaagtgttatgggtttttattttgtattttcggtttatttttgtatagggtagtgaagggggggggggttttttttttatttttttgtatggaaatttttacgttgtttattgggtaggggtcgcggttttttttcgggtcgaaggttttgttttttttagttttagattagtagtttttttttttttttttcgggatttttgtttggaaatgttgcggatagagttagagggggtgtgggggagatgtcgcgaatgtggcgtttgttatgatttttgttaattcggtttttttttattttggtttcgtttattttcgtttttttttcgcggtttcgttggtatcgcgttaatatattagggtgggtttttgcggtttcgcgttttttttcgttatttagtatttcggaggttagggttcgtaaggtacgaattatatatgtgaggcggtattttttgtatttatagatcgatcgggaagtcgtttttgtagatattttatatttttttcggtttttttcgacgtttttattttatttttagtttcgtcgttagggtgagcgcggggtttcgcgtagggaacgggattcgtagtcgttcgttttttttttttttttttttttttttttcgggtttagtcgtttcgtcgagtttcgtaggtttcgggtcgggagcgggcggaggaagggtcgggcgttcggcgtaagttcgcgtcgttttagtttcggtttcggttcggttcgtatacgtcgtttatttggaagtcggcgacgttgtcgtttatttttttgttgcgtgtcgtaaatcgaatagcgggcgttggtttttttgtcggatatttttttgttagcgtcgttttggtcgagtcgcgggggtcgaatgtgcgacggggtagagcggggggatggtttttttttggggggggggggagaattcgtttgattgtttagggaggacgggttgttttcgggttggggcgggttagatgttgtatttttcgggggggaaaaggtatcgggaaatgaggttagttgttgtattaaggatagaggggggtagagatagtgggagagatagagtgaacgtgaaaggggggggtcgaagagagggcgagggggagagaggatagcgagaggcgggtaggcgtatagcgggagagaatagtacggagagaaatagaaagcgtgtaattaatttattttggttcggcgaaggcgagagggcgggcgtgagggggggagggagtcggaggttaggagttgggggggacgggagggagcgaagggaaggttgcgggagaaagagcgggggtcggggttagacgttaagaggggcgcggggagtatagagaagcggagggaagggcgttacgtcgaggggtcgggggaggcggtgattggggggcggagtggaggttgtattcggatcgcgggcgtttagttcggtttgggtcgacggagttttttgtcgtcgcgagttcgggtttcgggagggggataggcggtggcggtatcggggtcgtttcgggacgtagcgcggaaaggggagcggttcgaggttgcgcgtcggggggagggttggagggggagcgcggggggggtgataacgtcggcggtttgcgagtcggattgtttgcggggggaatcgttttttcgggcgaagcggggatggggggagttgaggtagatgaagaggaggcggcggggaattcgtaggttcggcggagcgcgatttcgcggacggcgttcgggacgggagttagtagcgaggtagcgggcggcgtcgacgcggggtcgttttgttcgatggaggcgttggtgggtagagcgcgggtaggcgtgggttaggaggcgggggcggtcggaaggggggggtcggggtcggtcgggttttacgtagtttcgtcggagagtaggcgaattgcgggcgtttacgttcggtttttatagtcgcgttagttcgcggtttagggttcgcgcgggtttcgttggtttcgcgttcgcgttaatgggcgttcgcggagttttcgtttcgttttcggttcgttttcgtaattcgagttaagagcggggcggggggtgcgggttgggggttttggggtttcgggggggggggcggcggtcgtaggggttggggggtgcgcgggggcgaggttgggtggggggtagggagtcgtagagcgttaaggttatgttgaatgttcgttttagagaatttaggggttttatttcgggtttttggggtgttcgggcggtttgtgttcgtgagttggggttttcgggtaggtaggggtaggcgggtttttagcgttttattaggaggttgtattgcgggtgcgtttcgtttgagtgtagatgtaggtggtttggggttgagtcggggggtttttgttggttgttgcggttgagggggtttttgggttcgggcggggcgcgtagtcgttatttgttttagtagaaggagtcggttacgcggcgtttggagttttagttagatttcgagcgtttttcggtgtcgcgtcggagtttcggagttttcgttaggtgcgggacgcgcggaaggtcggttgcgtcgggtcgaatttgggttaggtttggagtttacggaggtttcggtcgttagaggagagaggattagggcgggaaatatagtttaaattttatttgtatggtcgagtttatcggggtgcgtttaagtagttcgtttttgcggtttatttaaaatatttggataatggttatttcgtttttagtgcgttggatttgtatagacgcgagttcggtttcgggggttattacgataatttgggggtttggggaaattattttttggagagtttgaacgatgtaagaaagtattgtgatttttattaagttaaaaattacgtataaaatttcgtatttcgttagtttttcgtcgtttaagtttagttaaggggaaggggtcgtcggcggaatttcgcgtttttttggtttttttcgtttttttcgtttcgttattaattatttcgttcgcgtttcgcgcgcgtttttcggcggagttttaggttcgcgggttagaggtattttatcgttcggcgggagcgtttttttttcgcgtttttcgttttagttttttgttcgttttattttgggattttttagtcgttttttttacgaatgagatttttgtaatgagtaaacgaaagtggcgcggatttcggggcgtttagtaggagcgagcgtagtcgttagtcgtaagttcgtagtcgtgtttcgcgttttacgtcggttttttcggcggtagtcggagacgagcgttagtatcggcgggatagtagtagatgcgggtcgagagtcggttaggggcgtagaggcggaggggatcggcgcggcggggagtttatcgcgaagttggaggttgcgttcgcgggcgtattaggagtttaggtagcgagcgatcgaacgttttgtggtaggcggtggacgttgttgaaggtgagcgagatttcggggttagtttttagtgttcgggagtaacgtttagttcgttggaagattcggggataatgtttaaatttgggggagattgggggtaatgttcggtcgtttttttggatacggggaagttttttttgtttacgttttgagggcgcgcggtcgatttaagtgtgtttgggtaacgttagagagaaattttttaaattcgagttgttttggggatttcgtaggagatagagaggttcgaaattagtgttcgttgtgcgcggggttggggaagttgtagtgggtggtcggcgagtcgggaataatgtttaaattttggggaacgtaaggtagagttttttttgttttgcgggtttagcgaatgggtgttttggaggaggggatttcggggatttcgttaatgtgggaatcgtgattaatgattaaattcgagattttagaaaaatagattataggtttgggggatgagagaagttgttttatgtaattgggaatatagagaaagaggttttaaataggggttagttagtttgggggattaatttgtgaggaggggtagttaaagaaaattttttatatgaaattgggaattttgtcgtagagttatattacgtaaaattggtagatgaaagtaaggaatatattttggggatttaaatatatttttggtgtgttagggggaagttgagattaatttttatattttaagaatataagttagtggtttggacgttggtagtagtcggggaaaaaataatttttataattattgtggttttagggaaaggttttaatattttttagagatggaagaaagtattgtttagattttgggggagtttggagtgtgattagtatatttggggaaagtaaaataaaaaataaaaaaatataaaattagtattatttttttatgttaatttttaaatgatttttattagtttatttttggtaaataagaaaaagattatatatttttttggatgtcgtttgtatttgggggagttttagtgaaatatattttaagtttttgggatatatggaaattatttaatggagatttgatatttaaatttttggaaatttagttagtagttaggaaatttataggtcgtaggtttttttatgtttgggattttttgggatttagggatattttttagtgtgttttgggggtttatggaatattttttaaatgtagggggatttagggtagggattataaagttaggagatttataaattagtattaaaaaaaaaaaaaattttaattgttttgtgaagggaaaaaaattttaatttgttttggaaggttgggagataatatcgtaatttgggggttttaggaaaatcgtttttgaatttaaagatttagggaagttgtttagagtttttggaggatttgggggtttatatgtatattttaaagaaaggggatttagaatttttaggttttaggatttaggaatttttagattttgtgatagggagtgtgtagtgtgtttgaaggaaatattgtttaattttgagatgatttagtgggttgtttggagtttaagaaattagtgttgttttgtgattcgagggtaatgttgaatgtttttagagggtttggagggtagcgtttagaatatttaagtatgggggattaggaaaagggtttagtgtgattttggtcgttggggttttagattaatgtttgaattttagaaaagtaagatttttgttatgaagtttttgggatttagagaattgtttaatagttaatatgttgtgatgtagagaaagtgttcggaatgtttgggaattggggtcgttagtaatatttggtataatagaaataaaagtaggttttgtttaaggggtttttttgtgtttggtgtagtttagagggattcgggagattttgtgtgatttggggggatttggagaattttgggttatatttgagtattttttggtaattgtttagtgtgttttagggatttgggtggtattgtttatattttaagggatttgattcgtggttaggtagtatatagagttatagacgttaatgttttaaagttttgtgatttatatatttataatatttttaatagttttggggaattattggggaaatttttttattttatgaaatttagataattagagggtaggtcgtttatgatttagaaaaggatttaatatgttttgggtgtaatgatcgaatttgggggaaggtatgggaagtaatttttatattttgagggttttaattttttagttttgttgagtgttatgagggatttgggatttaacgtgtaaagtttagggaatttaggttagtgtgaatagatttgcgggatttaatagtaaatgttttatgttgaggtgaacgggaaggggcgcgggggtggggtgggggggcgcggaatggggcggacgtgtgcgggaaatagtaagtttaggagattttggagttaatatttaaaattatgcgggaaagttttatttgttttggaaataatgtttaaatgtggaaaaggtattgtttatattttggggagttaggtaaattggttagcgcgattattacggattaagggtttcgtttttaaaattagggaattcgggttagtggtttgtaaatttgtgggatttggagggggtgtataaaattgtttagagtttgggagaaagtatatttggggttttaggttatatagtgtaagtttggaaaagttcgtcgggattgatgtgttttgacgttttcggaaattaacgtttaagaaaattattgtgattcgtcgaaatggtgaatatatttagaa

SEQ ID NO: 190 - DNA, 16842 bp, Artificial Sequence
  chemically treated genomic DNA (Homo sapiens)
ttttttaaagtgttgggattataggcgtgagttattgtatttggtttgttatttatgtatttatttttttttgagataagtttttgttatgttgtttaggttggttttaaatttttaggtttaagagatttttttaaagttttgggattataggtgtgagttattgtgtataattttgaagtggttaattttaataatatatttattttagtttaatatatttaaaattatattattttaatatgtaattattattaaaattattaatgagatattttattttatttttatttatttatttttttgagacggagtttcgttttgttttttaggttggagtgcggtggcgcgattttggtttattgtaagtttcgttttttgggtttacgttttttttttgttttagtttttcgagtagttgggattataggtgttcgttattacgtttagttaatttttgtatttttagtagagattaggttttattacgttggttaggatggtttcgaatttttgatttcgtgattagtttattttggttttttaaagtgttgggattataggcgtgagttattgtgtttggttagtgagatattttatttgtgttttttttttttttttttgagatcgagttttattgtgttgtttaggttgtagtgtagtggtataattttggtttattgtaatttttgttttttaggtttaagcgatttttttattttagttttttgagtagttgggattataggcgggcgttacgatatttggttagtttttgtatttttagtagagacgggggttttattatgttgtttaggttggttttgaatttttgattttaggtgattatttgttttggttttttaaagtgttgggattataggtaaaagtcgttatattaggtttatttttttttttttcgagacggagttttattgttgtttaaggtggagtgtaatggtaagattttagttttttgtaatttttgttttttgggtttaagcgatttttttgttttagttttttaagtagttgagattacgggcgttcgttattacgtttggttaatttttgtatttttagtagagatagggttttattacgttggttagattggttttaaatttttgatttcgggtgatttattcgtttcggttttttaaagtgttgggattataggtgtgaattatcgtgtttggtaggtttatttttaatttttttaattttggaaatttagtgtgtagggtaggtatggtgttttatgtttgtaattttagaattttgggaggtcgaggtaggtggattatttgaggttaggagttcgggattagtttgaataatatggtgaaattttgtttttattgaaaatttaaaaattatttagttatggtggtgtatgtttgtagttttagttattttagaggttgagataggagaattgtttgaatttgggaagtagaggttgtagtgaattaagattatgttattgtattttagttcgggtaatagagcgagatttcgttttaaaaaaaaaaaaagagagttagtgtggagggaagtgtttttgttgggttcgggtgttttgtgggattttgaggaaaagttcgtattaggtagatgttgttttgtttttatgggtaaaggatattttaataaatcgaggagtaaaatgttttcgtatgtttttttcgcgtagatttgttaggaagagtataagaagaaatattcggatttttttgttaatttcgtggaattttttaagaagtgtttggagagatggaagattacgtttgtaaaggagaagtgaagtttgaagagaaggtaaaaagtgataaagttcgttgtgatagggagattaaaaattatattttttcgaaatgtaagaaagggtaagaaaggaaagaaaaaggatcgtaatgtttttagaaggttattatttgttttttttttgttttgttttgaatatcgtttaaagattaaaagtggatatttaggtttatttgtcgtggaaattgtaaagaaattgggtgaaatgtggtttgggtagttagttaaagataaataattatatgagtagaaagtagttaagttataggagagatatgaaaagggtattgttgtatatcgtgttaagggtaaaagtgaagtaggaaagaagggtttaaagaagaataaattagaagatgaggaggaggaggaggagaaagaagatgaagatgaggaggaagagggtgaagatgaagaataaatggttattttttaatgatgtttgtgtagtgggtttgttttgttaagaatgtgaattttagtatagtttagtattagttttagtataaaattgtataaattttcgtatagtttataagattttttgtatagaaaatattttttttttttttttttttttttgagatagagtttcgtttttgttgtttaggttggagtgtaatggcgtgatttcggtttatcgtaattttcgtttttcgggttttggtttaagtagtttttttgttttagttttttgagtagttgggattataggtatatgttattacgtttagttaatttttgtatttttagtagagatggggttttattatgttggttaggttgtttttaaatttttgatttcgtgattcgtttgtttcggttttttaaaatattgggattataggtgtgagttatcgtattttgtttaatgtttttaaatatttaatggtttttaaaaaatttattgtgtatggtagtatagtatatttgtaggaattagtattaatagtatattttgcgttttttaagatgttgtattttttaatattttgtaataaaattatgcgtattaaaaaaataaagaaatttcgtgtgtagtttatatttatagtatattttcgtttaggtatttgagagaatgattaggaggggtttttggaggaggtggtttttgaacggagaatttatttttaaggattttgtttgtaatggttattaagtattttttgagttatttttatgtgttttgtagttttttgaaggggcgtgggatttatcgatgttaattatttagtattatttttagattttaagaagttggggtgtgagttagtaattagtatagaaaagagatattaaaataagtttgagttggggagtgtttttttaattttagttttttggaagagattttttttttttttttgagatagagtttcgtttttattgtttaagttggagtgtagtggtacgatttcggtttatcgtaatttttttttttcgggtttaagcgattttttttttttagttttttgagtagttgggattatagatatgtatttgtaatttttattaaaaatataaaaattagtcgggcgtggtggcgtacgtttgtaattttagttattggggaggttgaggtaggagaatcgtttgaaattaggaggcggagattgtattaagatagtttgttttagttaaataatttggcgttagtgtaggaaaaggtggaaggtacggggttagtataggagggtttaatatttttaattttattaagttatattttggtaatttttgttttttacgagaagttttcgttgggtttgttttagcgttgttttgaggttttttttatgagtttcgatagggtagaggtcgttttgagcgttttttttttttttggtttaagagtggtttaaaagaaggatttttgattggaattggttattttgtgttattttttgatttttgatttcgttttaaagggggatgcgggggaggggttttggtaggggtggtttcgttttttttaggttcgtaagtttaggttttcgtttatcgggtttagtttattttgcggtcgtttagggaggtcgttggtattcgtgatttacgatttttttttcgagttttatcgaggttatagtcgtggtttcgtttttttatgtttgtttttcgttttttgttcgtgacgggcgttttcgaggattaatgagcgcgttgtatttatttttcgggcggggttaagcgtcgattaatcgtcgttcgggcgttcggtcgggtttaaacgttttaatcgttagcggcggcggggcgggtagagggtcggggatggtaggtttaattaacgggtgggtacgtcgttttcgcgaggaggcgtgttttgcggtcgggcgtgcggtgttcgcggcggcgtagggagggggagggaggtaaataagatggcggcggcgtgtcgggcgcggaagggggaggcggttcggggcgttcgcgagtgaggcgcggggcggcgaagggagcgcgggtggcggtatttgttgtcgcggttttggatgggttgggtttttttcgtcgtttcgttttttttatacgcgcggcggtcgcggcgagggggacgcgtcgttcggggttcggtattttcgggaatttttcggttcggagtttgcggtttgcgtcgtttcggtcgtcgggagtttcgtggagttttcgtcgtcgcgtcgtttcgcggatcggacgttgagggtattcggggcggggcgcgcgttcgggtagacgtttgcggggaggggggcgtttgtcgggtttcggcgattattttgggggtcgcgggtcggttcggggggcgtttagtgcgggttttcgcgggcgtcgggtagcgattagttttgagcggagttgttggtcgcggcgggaggtttttcggacgtttttagtttttcgaacgttcgttcgggtcggcgggagtcggcgtttttcgggaggttcgttcggtcgttcgcggcggagcgtttgtttttgggataggcggtgggatcggggcgtcgtcggagacgtttttagcgaagttgggttttttaggtgtgggggtttcggggggtagcgacgtcgcggattcggtttgtgggatgggcggttcggagaagattgcgttcggtcgtgtttatatttgttcgtgggtttgaggttttcggaggatgatttagtattgaaaagtttcggtcggtttttttagggttttcgaggacgaagttgattttgatcgggtcgttttttagttttgaggttcgggttttattggaattcgcgtttgagtcgtcgtttcggattttcggtgttcgtcggttcgtagattttgtatcgggtttggattcgtagtcgggattgacgtgtagaataatcgtttttgttggaagaagggttttttttttttttttggggtttttgttgtttttttttttttttttttttttgtaaaattttggagaagggaagtcggaatataaggaaggatcgtttattcgcggatttagggttggcggcgggattttaggattttgggtttagtatggaggtggtggattcgtagtagttgggtatgtttacggagggcgagttgatgtcggtgggtatggatacgtttatttatcgtatcgattttatcgaggttatttattagtcgcgtcgtaagcgggttaagtttatcggtaagtatttgatgggggatttgttgggggaaggtttttacggtaaggtgaaggaggtgttggattcggagacgttgtgtaggagggtcgttaagatttttaagaagaagaagttgcgaaggatttttaacggggaggttaacgtgaagaagtaagtatggtttgttggggtcggggtcgggtcgggttagttacggtgttgatggttttgttttttttttttttttttttttttttttttttatttttttttaatattttgagttggattcgtttggcgtttgtgtttttcgtgttagggagagcgtggttgggggtttgcgttacggatttttatttaggtaaggttagttgtcgtagcggggcgtgcgtttgtatgggtttttggattttagttaaaatgttttggtagcgaaatttttttgagaagggagcggtttttaattttttaagattagttttttggtttttttagttgtttaaggagtagaggcgtttagtggaattagtttgtgtttgtttgggtttcgagagtttgtgtgcggtcgttaatacgttttttgcgtagtgtgtggtcgttatcggggttaggcgaaatgtgatttgtttattttgttagaggggaattttgggttgttaaaaataattgtttgtatcggtttattagttagtaggagggaaacgtagtttttttttatttgttagggatgtgacgttggaagtatttttggttttcggggttggaagttttgttcgagggggattgtgtttttttttcgaattgtattcggaagattttatttttttaattgatttttttaggtacggggttgtcgttgggtatttcggacgtttttgtatttgtgcgcggagaagtttttatttagggtagtattggtcggtttgagttttttttagttggtgggggtggtcgggggtgtttttgttttatcgtagttagatacgttgtatttgtcgtcgtttggcgggttttgtttaggttttgttttttttttagtttttttaatttttaaaattttgttttttgtttttaagaaaggattttatttgttgggttaggtttcgagggattggtaaggatattttgcgtagggtattatgattttggaaggaggttcggggaggggttgttgcggtgtttgtttttattttttttttgtttaggggttttggggtttttgtcgtgtttgtttttattttttttttgtttaggggttttggggtttacgtatatttttttttttttttttttgagacggagtttcgttttgttttttaggttggagtgtagtggcgcgaattgggtttattgtaagtttcgtttttcgggtttatgttatttttttgttttagtttttcgagtagttgggattataggtattcgttattacgttcggttaattttttgtattttttagtagagacggggttttatcgtgttagttaggatggttttaattttttgatttcgtgattcgttcgtttcggttttttaaagtgttggtattataggcgtgagttaacgcgtgcggtttttttttttttttttttttttttttttgagacggagttttatttttgttgtttaggttggagtgtagtggagtggttttggtttattgtaattttcgttttttgggtttaagtgattttcgtgttttagtttttcgagtagttgggattataggtgtttgttatagtgtttagttaattttttttttttttttttagtagagacggggttttattattttggttaggttggttttgaatttttgatttcgtgatttatttgttttagttttttaaagtgttgggattaaaggcgtgagttatcgcgttcggttagtacgttttttaattagtatgtaggttgtgatatgcggaaattaggggtataggttttgaagtttgtattttggagttggagtagttagggttaaatgggagcggttgggaagggtgtgtttttacgaggtttttttgatgttttagtgtttagtttggattcgggtagaaggtgtggttagtgttttgagttagtggagtagttgtttgtgtttggtttttgtgagatgggttggttaggggttaggtagagtttgtgtttggtttttgtgagatgggttggttaggggttaggtagagtttgtgttgggggtagtaggtgttttttaaaggggttagtgatagttttttttttagtagtgagaaatttacgtttaggggtcgggcgcggtggtttacgtttgtaattttagtattttgggaggttgaggtgggtggatcgtttgaggttaggagttcgagattagtttggttaatatggtgaaattttatttttattaaaaatataaaagttagtcgagtgtggtggcgtgtgtttgtaattttagttattcgggaggttgaggtagaatattgttggagtttgggaggcggagtttgcggtgattcgagatcgtattattgcgttttagtttgggcgatatagcgagattttgttttaaaaataaataaataaataaataaataaataaataaataaataaatttggtttgagttttgataaatgtatatgtagggttaatgggaagatagacgttggagggtggaagtttgattgtgagagtgagttttttgtttttttgaatagttagtggaggaggttttgggagtttaggtgagtatttgaacggtagggtagagtttgagggttttggtggagataggtaagaaggttgtaggaatttagtttggtttagtgtttgggagaacgggagggaatacggaggtagggaggtagaggggttggtaggatttggattggattgtgcgtcgtagttatttatagtttgattttattgttttgaagtgagtgatgtatttttattagtgtttagcgtttaattttattttggttttgagtgtgtaacggttttgtttttgcggggttttttgggatgaggggtgagttttgtttttttttggttattgtttgttattaggagttgtttcgtttatagttgtgatttaggagttattgtattttttttagttttttgggtgttgttagggggtttttttattttgggagttggtgtgttttgattggaggttgttatgtgtagagtgttgttaaggagaaggggtgtttattgtttagttttgaggtttaaggttttggttagttttgttgttagcgttgtagggaaaaagttttttttgtgtgtgggaagtttaataaatttcgtttagattgtgtttcgtagcgagtgtttggaattttttagataagttttaggcgttcggttttttagttggtgtggaaagcgtgggcgattattaaggggggtgggttggggtagatggagtcggcgtgagtttcgttttttttttttttttttagaaaggtagttttggagtttatgttttgtttcgtttttatcggtaaaaagtataattttattagaaataggaaagttttaaaaagtattaatgagttaaaaagagggttgggtatgttcggttatgtttgtaattttagtattttgggaggttaaggcgggtggattattcgaggttgggagttagtttgattaatatggtgaaattttgtttttattaaaaatataaaattagttgagtgtggtggcgtacgtttgtaattttagttattttggaggttgaggtaggagaattatttgaattcgggaagtagaggttgcggtgagttaagattatgttattgtattttagtttgggtaataagagtgaaatttcgtttcgaaaaaaaaaagggttggggtcgggcgtggtggtttacgtttgtaattttagtattttgggaggtcgaggcggtttgattataaggttagaagtttgagattagcgtggttaatatggtgaaattttttttttattaaaaatagaaaaattagttaggtgtggtggtatatgttaataattttagttattttatttgaggttaggagtttaagattagtttggttaatatggcgaaatttcgtttttattataaatataaaaattagttaggcgtggtggcgcgcgtttgtagtttagttattggggaagttgaagtaaggagaatcgtttgaatttgggaggcggaggttgcggtgagtcgagatcgtattattgtattttaggttgggtaagtttaggagagaagagcgaaattgtgttttaaaaaaataattaattaaaataaaattagtgttataggttgtttttggtaggtagtgggtttttagggtggagtagggaagggttggaaagggtcgtttgtgtttagttcgatttttcgtgtttttcgggggatagtacggttagttgttgttgcggagtttatagtggggttttgggggggggggtgtaggtagaaggtcgttatgtttttttttttttttttattttagtgagagtgggttcgaaggtagggagtttgttcgttttgtggagttttcgtagaggtatttagggttgtcgtgagcgtatagtttggcggtgttttacggttttgtttttttttgttatttttatttgttgtaaaatattgtgttttcgtattttttttttttatttgtttggaaatgtgaaaattattgttgtcgtaggaaacgggtttagattcgggttgtggtttttttattcgtatcgttttcgcggtgtttagttaggaggtgggaggtgggcggtatttagtgtgtttggttgcggcgatgattggtagatgtttggatttatggtaaagaggattttcgcgagttgggagttagttttggattttgtaggtttttatattttaggcggtttttatggggttttagtatttgttgaggtttttgcgttagttatgtgaggtttgggtgttttcgaggtttttgtttgtgtttttttttgggtagcgggagggagagttttgagatttagagggagtttaggggttgggtagtcgtagaatagcgggggtaatgggtttattgggggttttgggttgtgtatatagtgggttttcggtgtttagttagttggggtaggtttggaatgttggttttttttttaggatttggggcgttgttgtagttgtcggggaattagtgaggcggttggacggttcgtatattttataaacgttatcgtattgtttaaattggatttaatttttttaatatttttttttttttttttttttttttttttggagatagggttttattgtatcgtcgaggttggagtgtagtggcgtaattatagttttgggtttaggtgatttttttgtttttaaggtagttgggattgtagatgtgtattattatattcgattagttttttgtagagatggggtttcgttatgttgtttaggttggttttaaatttttagatttaagttattcgtttgtttgggttttttagagtgttgggattataggtatgagttattgtttcgttacgtttatttttatttatttatttatttatttttgagacggagtttcgttttgttttttaggttggagtgttgtggtacgattttggtttattgtaagtttcgttttagttttttaagtaagttggaattataggtgtttgttattaagtttggttaattttgtttttgtatttttagtagagacggggttttatcgtgttagttagtatggtttcgattttttgattttgtgattcgttcgtttcggttttttaaagttttgggattataggtttgagttattgtgttcggtttatttttttattttttattttatagagataagggtttgttgtgttgtttaggttggttttgaatttttgattttaagtaattttttttggttttttaaagtgttgggattataggtgtaagttatagtattgggtttaaagtttattttttttttttttttttttttttttgagatggagtttcgttttgttatttaggttggagtgtagtggcgtgattttggtttattgtaagttttgtttttcgggtttatattatttttttgttttagtttttcgaatagttgggattataggcgtttgttattatgttcggttaatttttttgtatttttagtagagatggggttttattgtgttagttaggatggtttcgattttttgatttcgtgatttgtttgtttcggttttttaaagtgttggggttataggtgtgagttatcgtattcggtaaagtttatttttttaaagtgtgtaatttagtggtatatagtatattgatagagttgtataattattatttttattagtttttagaatatttttgttattttagaaggaaatttcgtttttgttagttattattttttattttttttttagtttcggtatttacgtattttttttttgtttttggattggtttgttttgaatattttatacgagtggtgttatatatcgcgtggttttttgcgttcggtttgttttacggagtgtgttgtttttaaggggtattcgcgtcgtggtttgggttcgaatttttttgttgtttacggttgcgttattttttagtgtgtggagggttacgttgcgtttgattgtttatttgtggttggatatttgggttgttttcgtttttgtttgtgaattgtggttgttttggtgtacgtgtgtttagtcggcgtttttttagaatttttgagggttttgttttagttatattaggagggatttagggattagggtacgcgggtttggagttgggtgtttttgggtttttatgtgttttttagttttgttttgagtcgtgggaggtcggggcgagggttaggtttattttttttttgtatgatttgtttttaggtagacggaggtttttagttttatttttttgtgagtttgagtggcgtttatgatttttttttttattttttgttttgttaattaataagttagttaaatagtttatgttgtttgggtaagtttagtaggtttttaacgtggtatttcggagcggttggcgatgttttaagagtcgggttttttttttttggaggttttttttgtttttcgttaagtttttaggtttcgttgggtttttttttttgttttttttttggttggagacgttagaggaagtttggcgatttagagaagttgatgtgtatttattatttcggaggtgattgttattaggcgggggtggttttatttttattttttttttggtataaatcgggggacgtacgtgtttgcgtagaatgttttggttttttttaattaaatagataatttagtgttttttggtttatgttgatttgtttaggagtgtttgggtttttttacgttttagttgttgtgtgttttgttgttgtgaagtgttttcgttgaggtggaggtagggtagggcgttttcggtgagggcgagtttttttgtgttcgtttttttatttgtagaatgatggtttatggaggagatatggtgtcggtaggtggtggtcggcgtagggaggtttttaggagggagttttttatttttatttgtttttagggtcgtgtagtttttcgagcggtttttacgaggttttgaggttgtatgtaggttgagtttttggttttattgtttttttttagggttaggattgtgttggagtttgggtgggtgtggggtggtttttgtataggtagtaggaggtgggttagagcggtgttggatttgaaggttcgtggtttttttagttttattgaggaggttggaatagtgttttgggttattttttttgtcggtagtcggtttttgttgagggagggggtgttttcgttttttggtggagtattaggtttttggggtttgtgcgttcgagtatttggtttttgttgtttgaaaatagtatttttttcgtttttcggttatcgtattttttttgaatagaaggtaagttttgttttttaggaatggtttgtgatttttattagcgggggaggttaggggtatatagagttttggggaataaggggatttggggttgagtcgggtttttcgggtttatttcgagtttttttgagtagtttggtaggtaggaaggcgttgggtttcggggtttttgtcgagtttagttttatttttagcgttttttttaatgttttgggtgtttgttaggttgtggatataggttttggttagttttataaataattttgtcgggttttgttgggaattggtgttattattatatagtttagagagaacggaaatatagggttttttagcgagtagattaggtttgcggtgattagtggaagtgggggacgtttttagggttgggtagttcgatagggtatcgggtatagttaggggtcggaattagttgtttattggtttcgtttttgggggattgtgtttttttgtgtttcgtttttattatattttgttttttttttattttgtttttttagtttttttttagattggcggttttttgtttaggtttagttttagtatagtttgtagttttggtagagtttaggttttggttttttgaggttgttttgagggtagtgagtaatgagttttgggattggtgtattgggagggaaaggtgagttaaggttttttgtaagaggtagttttgagttgggggtggggaaggttgggtcgtgggatatttttgatattttaagttttttttttgagatggagttttgttttgttatttaggttggagtgtagtggtgagatttcgattttttgtaattttcgttttttaggtttaagcgatttttttgttttagttttttgagtagttgggattataggcgtttattattacgttcggttaatttttgtatttttagtagagataaggttttattatgttggttaggttggtttcgaatttttgattttaggtgatttatttcggttttttatagtgtcgggattataggcgtgagttatcgcgtttggttttttagttgttttttatgttttatgtttgggttttttgttaagaattaaaaaagaaaaaaaaaattatggagatggaatttatatattgtataatttattcgtttatagtgtataatttagtggtattaagtatatttatacggttgtgtaattattatttttaattttagaacgttcggttattttaaaagtaagttttatttttattgtgttattttttattttttttattagtttttggttattttgaatttattttttggttttggattggtttgttttggatattgtatagaaatgggattttgtcggtcgggcgcggtgatttacgagagtaagagatttagattattttggttaatatggtgaaattttatttttattaaaaatataaaaattagttgggcgtggttgcgggtatttgtagttttagcgatttaggggttgagttaggagaaatcgtttgaattcgggaggtagaggttgtagtgagttgagattatgttattgtattttggtttggcgatagagtgagatttcgtttttaaaaaaaaaaaaataagaaatgggattttgttattttagcgtttttcgaggtcgaggtgggtagatgatttgagtttagtagtttaaacgagattagtttgggtagtacggtgaaattgtttttattaaaatataaaaattagttgggtatggtagtatacgtttgtagttttagttatttgcggggttgagatgggaggatcgtttgagtttgggaggtgtattttagtttgggcgatagggaaattttgttttaaaaaaaaaaaaaaaagtgtattatatattgtgtgttttttagtgttttattgtgatatttttaaggtgtagttaggttgtggttcgagttagagttttattggtttttgtggttgagttttgttgagtgcgtggatgggttgtgttgattttcgtttgtggaagggtttttgggtggttttatatttcggttgttgtgcgttttgttgttgtgagtatttcgtgtttcgtttttgcgtggcgtgtattgttttttagggtgtgtatttgggagtggagttgttggtttatagggtaatagatttttggagaagttgtagacgtttttacgtttatttattgggtgtgaggattttgtttttcgttatttttgtttttgtttaatttttttttttatgagatagggttttattttgttgtttaggttggagtgtagtagtacgattataggtaattataggtttaagtgatttttttatttgagtttttcgagtagttaggatttgaggtacgtatttttatatttggttaatttttgtatttttagtagagatagggtttcgtcgtgttgtttaggttggtttcgaatttttgagtttaggtgatttattcgtttcggttttttatagtgttgggagaaatgaagtgtttgcgatagggcggtagttgtagagggggttgtgttttttggtttgttgtgttttatttttgtgataggtaggtgggcgtggttaattgggcggtagttgtagagggggtagtgataggcgggtgggtgtggtaggattttataatgtttttttttgtggcgttttttttttcgtttgtttttttttatgggttatttttttagtttatttgcggtttattttttaaggagtgggattttcggagttgggagtttttggttgcgtgggattgtattgtgtgacggagttattattagggttttaatttattttggtttttgttatagtttgggttttatttgtgttattattgtagtagtttggtttttaggaagtaaaattgttattgagttataaagtttaattaagagtgttttttgggaggtcgaggcgggcggattataaggttaggagatcgagattattttggttaatatggtgaaattttgtttgtattaaaatataaaaaaattagtcggttgtggtgatacgtgtttgtagttttagttattcgggaggttgaggtagggaaattatttgaatttgggaggtagaggttgtagtgagttgagatcgggttatcgtgttttagtttagggatagagtaagattttgttttagaaaaaaaaaaaagtgttttaattgtgttttttaaagttttcgtcggtcgatgatagattagagggcgttgtgtttttattttttatcgttttgagtttggacgcgtggtttttgtagggtttttttttatagtattgtgaatttatagtttttttttagggaagggaggaggtacgttatttttatagggagatggggaggtcgattttagggatttaggttattattttgacgttgggtcggttgatatatttttgttttttttgttttagg

SEQ ID NO: 191 - DNA, 16842 bp, Artificial Sequence
  chemically treated genomic DNA (Homo sapiens)
tttgggatagagaggataggggtgtattagtcgatttaacgttaggatgatggtttggatttttggagtcggtttttttatttttttgtggaagtggcgtatttttttttttttttagagagaagttgtgagtttatagtgttgtgggaaagggttttgtaggggttacgcgtttaggtttagggcggtagggggtgggagtatagcgttttttagtttgttatcggtcggcgagggttttggaggatatagttaggatatttttttttttttttgagatagagttttgttttgtttttaggttggagtacggtggttcgattttagtttattgtaatttttgttttttaggtttaagtgatttttttgttttagtttttcgagtagttgggattataggtacgtgttattatagtcggttaatttttttgtattttagtatagatagggttttattatgttggttaggatggtttcgattttttgattttgtgattcgttcgtttcggttttttaaaggatatttttaattgagttttgtaatttagtaatagttttgttttttagaaattagattattgtaatggtagtatagatggagtttagattgtggtaggagttagggtgagttggagttttggtgatggtttcgttatatagtatagttttacgtagttaagggtttttaatttcgagggttttattttttggagggtgggtcgtaggtgagttggaaggatggtttataggaaggggtaggcgaagaaggagacgttatagaaagagatattgtggggttttgttatatttattcgtttgttattgttttttttgtagttgtcgtttagttggttacgtttatttgtttgttataagggtggggtataataggttagagagtatagttttttttgtagttgtcgttttgtcgtagatattttattttttttagtattataggaggtcgaggcgggtggattatttgagtttaggagttcgagattagtttgagtaatacggcgaaattttgtttttattaaaaatataaaaattagttaggtgtggaggtacgtgttttaagttttagttattcgggaggtttaggtgggaggattatttgagtttgtagttatttgtgatcgtgttattgtattttagtttggataatagaataagattttgttttataaaagaaaaaattaaataaaaataaaaatgacgaggagtaaggtttttatatttagtgggtgggcgtggaagcgtttgtagtttttttaaaggtttgttattttgtgagttagtagttttatttttaggtatatattttgaggaatagtatacgttacgtagaaacggagtacgagatgtttatagtagtaggacgtatagtagtcgagatgtggaattatttaggggtttttttatagacgaggattagtatagtttatttacgtatttaataagatttagttataaaaattagtgaggttttgattcgagttatagtttagttgtattttgaggatgttatagtgagatattaaaggatatatagtgtgtgatgtatttttttttttttttttgagatagggtttttttgtcgtttaggttggagtgtattttttaggtttaagcgatttttttattttagtttcgtaagtagttgggattatagacgtgtgttattatgtttagttaatttttgtattttagtagagatagttttatcgtgttgtttaggttggtttcgtttgaattattaggtttaagttatttgtttatttcggtttcggaaaacgttgggatgataggattttattttttgtttttttttttttggagacggagttttattttgtcgttaggttagagtgtaatggtatgattttagtttattgtaatttttgtttttcgggtttaagcgattttttttgatttagtttttgagtcgttgggattataggtgttcgtaattacgtttagttaatttttgtatttttagtagagatggggttttattatgttggttaggatggtttggattttttgttttcgtgagttatcgcgttcggtcgataggattttatttttatgtaatatttaggataagttaatttagagttaggaagtggatttagagtggttaggagttggtggaggggatggagagtgatataatgggaatggggtttgtttttggggtgatcgaacgttttggaattagaagtagtggttgtatagtcgtgtgaatgtatttaatgttattgaattgtatattgtgaacgaatgagttgtatagtatgtaaattttatttttatagtttttttttttttttttaatttttaataggaagtttaagtatggagtataaaaaatagttggggggttaggcgcggtgatttacgtttgtaatttcgatattatgggaggtcgaggtggattatttgaggttaggagttcgaaattagtttggttaatatggtgaaattttgtttttattaaaaatataaaaattagtcgggcgtggtgatgggcgtttgtaattttagttatttaggaggttgaggtaggagaatcgtttgaatttgggaggcggaggttgtagagagtcgagattttattattgtattttagtttgggtgatagagtaagattttattttaaaaaaaaaatttggggtgttaggggtattttacgatttagttttttttatttttagtttagggttgttttttgtaggaagttttggtttattttttttttttagtgtattagttttagggtttattgtttattgtttttagggtaattttagaaggttaaggtttgagttttgttagggttgtaggttgtgttggggttgggtttggataaggggtcgttagtttggggaggggttaggagagtaggatgaagggaaagtaaggtgtgatggggacggggtatagagggatatagttttttagaagcggagttagtgagtaattggtttcggtttttggttgtgttcggtgttttgtcgggttgtttagttttgaaagcgttttttatttttattggttatcgtaggtttggtttgttcgttgagaagttttgtgttttcgttttttttgggttatgtggtggtggtattaatttttagtagggttcggtaaggttatttatagaattggttagggtttgtgtttatagtttggtaggtatttagggtattgagggggacgttgagggtgaggttgggttcggtaaaggtttcggggtttagcgtttttttgtttgttaggttgtttaggagagttcggggtgggttcgagaggttcggtttagttttagatttttttgttttttagggttttgtgtgtttttaatttttttcgttgatgaaggttataggttatttttgggaggtaagatttgttttttatttagaggagatgcggtggtcggggggcggggaaggtgttgtttttagatagtagaggttagatgttcggacgtataggttttaagagtttgatgttttattaggaggcgaaagtatttttttttttagtaggagtcggttatcggtagggaaggtggtttaggatattattttagtttttttagtggagttgagggagttacgggtttttaggtttagtatcgttttggtttattttttgttgtttgtgtagggattattttatatttatttaggttttagtatagttttaattttgaggaggggtagtgaggttaggagtttaatttgtatgtagttttagagtttcgtgggggtcgttcgggaggttgtacggttttaaaagtaaatgagggtggaggatttttttttggaaatttttttgcgtcggttattatttgtcgatattatgttttttttatgagttattattttatagatggggaaacgggtataggaggattcgtttttatcgaaggcgttttgttttgtttttattttaacggggatattttatagtagtaggatatatagtagttgaaacgtggaagagtttaggtatttttgagtaggttagtatagattaagggatattgggttgtttgtttaattaaaagggattaaggtattttgcgtaggtacgtgcgtttttcgatttatgttaggggaggagtgggggtggagttattttcgtttggtggtagttattttcgggatgatgggtgtatattagtttttttagatcgttaggttttttttgacgtttttagttagaaaaagagtagaagaggaggtttagcgaaatttaagagtttggcgaggaataggaagagtttttaggagggggaagttcggtttttggggtatcgttagtcgtttcgaggtgttacgttaggggtttattgggtttgtttaggtagtatggattgtttagttgatttgttgattagtaggataggaaataggaaggagagttataaacgttatttaagtttatagagaggtggggttaggagttttcgtttgtttagaaatagattatatagggaagagatgggtttggttttcgtttcggttttttacggtttagagtaggattgggaggtatatggagatttaggaatatttagttttagattcgcgtgttttggtttttgaattttttttgatgtggttgaaataaggtttttaaggattttagagggacgtcggttgagtatacgtgtattaaagtagttataatttataggtagaggcgggagtagtttaagtgtttagttatagatgagtagttaaacgtagcgtggttttttatatattggaaagtgacgtagtcgtgaatagtagagaggttcggatttaggttacggcgcggatgttttttgaggatagtatatttcgtgagataagtcggacgtaaaaggttacgcggtgtgtgatattattcgtgtgaaatgtttaggataggttaatttagaggtaggaagggaatgcgtgggtgtcgggattggggagggaatggggagtgatggttgatagagacggggtttttttttggggtaataagaatgttttggaagttgatagaggtgatagttgtgtaattttgttaatgtattatatgttattgaattatatattttaaaaaggtgaattttgtcgggtgcggtggtttatatttgtaattttagtattttgggaggtcgaggtaggtagattacgaggttaggagatcgagattattttggttaatatagtgaaattttatttttattaaaaatataaaaaaattagtcgggtatggtggtaggcgtttgtagttttagttattcgggaggttgaggtaggagaatggtgtgaattcgggaggtagagtttgtagtgagttaagattacgttattgtattttagtttgggtgatagagcgagattttattttaaaaaaaaaaaaaaaaaaaaaaaaggtgaattttaggtttagtattatggtttatatttgtaattttagtattttgggaggttagagaggattatttaaggttaggggtttaagattagtttgggtaatatagtaagtttttgtttttataaaataaaaaataaaaaggtgggtcgggtatagtgatttaagtttgtaattttaggattttgggaggtcgaggcgggcggattataaggttaggagatcgagattatattggttaatacggtgaaatttcgtttttattaaaaatataaaaataaaattagttaggtttggtggtaggtatttgtagttttagtttatttgggaggttgaagcggagtttgtagtgagttaagatcgtgttatagtattttagtttgggggatagagcgagatttcgttttaaaaataaataaataagtaaataaaggtgaacgtggcgaagtagtggtttatatttgtaattttagtattttgggaggtttaggtaggcggatagtttgagtttaggagtttgagattagtttggataatatggcgaaattttatttttataaaaaattagtcgggtgtggtggtgtatatttgtagttttagttattttgggggtaggagggttatttgagtttagagttatgattgcgttattgtattttagtttcggcgatatagtgagattttgtttttaaaaaaaaaaaaaaaaaaaaaaaaaaaggtgttaagaaaattgagtttagtttgagtaatacggtggcgtttgtgggatatacgggtcgtttagtcgttttattgatttttcgatagttatagtagcgttttagattttgagagaggaattaatattttaggtttgttttagttggttgggtatcggaagtttattgtgtgtatagtttagaatttttagtggatttattattttcgttgttttgcggttgtttagtttttgagttttttttgggttttagagttttttttttcgttgtttagagaggggtataaatagaggtttcgaggatatttaggttttatatggttggcgtaggggttttagtagatgttggaattttataaaggtcgtttgggatgtaaagatttataaagtttaggattgatttttagttcgcgaaaattttttttattataggtttaagtatttgttaattatcgtcgtaattaggtatattgagtgtcgtttattttttattttttggttggatatcgcgggggcggtgcggatgggagagttatagttcggatttgggttcgttttttacggtagtagtgatttttatatttttaaataggtagaaagaaaagatacgaaagtatagtgttttgtaataggtggaagtgataggaaagggtagggtcgtgggatatcgttaggttgtgcgtttacggtagttttgggtgtttttgcggaggttttataaggcgggtagattttttgttttcgagtttatttttattggggtggaaagggggagggaggtatggcggttttttgtttgtatttttttttttagaattttattgtgggtttcgtagtagtagttagtcgtgttgtttttcgagaagtacggggagtcgggttgggtataggcgattttttttagtttttttttgttttattttaggaatttattgtttattagaaatagtttatggtattgattttattttaattaattgtttttttgagatataatttcgttttttttttttaggtttgtttagtttggaatgtaatgatgcgatttcggtttatcgtaattttcgttttttaggtttaagcgattttttttgttttagtttttttagtagttggattataggcgcgcgttattacgtttggttaatttttgtatttgtagtagagacggagtttcgttatattggttaggttggttttgaatttttgattttagatgaagtagttgggattattggtatgtgttattatatttggttagtttttttatttttagtagagagagggttttattatgttggttacgttggttttaaatttttgattttgtgattaaatcgtttcggttttttaaagtgttgggattataggcgtgagttattacgttcggttttagtttttttttttttcgagacggagttttatttttgttatttaggttggagtgtaatggtatggttttggtttatcgtaatttttgtttttcgggtttaagtgatttttttgttttagtttttagagtagttgggattataggcgtgcgttattatatttagttaattttgtatttttagtagagatagggttttattatgttggttaggttaatttttaatttcgggtgatttattcgttttggttttttaaagtgttgggattataggtatgatcgaatatgtttagttttttttttaatttattgatgttttttggaatttttttatttttaataagattatattttttgtcggtgagagcgggataaggtatggattttagggttgtttttttgggaaggaagggaagagacgggatttacgtcggttttatttgttttaatttattttttttggtgatcgtttacgttttttatattaattggaggatcggacgtttgaggtttgtttggaaggttttagatattcgttgcgagatataatttgagcggagtttattaaattttttatatataaaggaggttttttttttgtagcgttggtagtaaggttggttaaggttttgggttttagggttgggtagtggatattttttttttttgatagtattttgtatatggtagtttttagttagaatatattagtttttagaataggaggattttttggtagtatttagggggttggaggaaatgtagtggtttttgaattatagttgtaagcggggtagtttttgatggtagatagtgattaggaagggatagggtttattttttattttagggggtttcgtaagggtaaagtcgttatatatttagggttaggatgaaattggacgttgaatattagtgagggtgtattatttattttaaggtagtggggttaagttgtgggtagttgcgacgtatagtttagtttaggttttgttaatttttttgtttttttgttttcgtgttttttttcgtttttttaggtattgggttagattaggtttttgtaatttttttgtttgtttttattaagatttttaggttttgttttatcgtttaggtgtttatttgagtttttaggattttttttattgattgtttaggaaagtagggggtttatttttatagttaggtttttattttttagcgtttgtttttttattgattttgtatatatatttgttaaaatttaagttagatttatttatttatttatttatttatttatttatttatttatttttgagatagagtttcgttgtgtcgtttaggttggagcgtaatggtgcgatttcgggttatcgtaagtttcgttttttaggttttagtaatgttttgttttagtttttcgagtagttgggattataggtatacgttattatattcggttaatttttgtatttttagtagagatggggttttattatgttggttaggttggtttcgaatttttgattttaggcgatttatttattttagttttttaaagtgttgggattataggcgtgagttatcgcgttcggtttttaagcgtgggttttttattgttgggagagagattgttattggtttttttagagggtatttgttatttttagtataggttttgtttagtttttgattaatttattttatagagattaggtataggttttgtttagtttttgattaatttattttatagagattaggtataggtaattgttttattgatttaaggtattggttatattttttattcgggtttagattgggtattgagatattagaaaggtttcgtggaaatatattttttttagtcgtttttatttaattttgattgttttagttttagagtataaattttagagtttgtgtttttggttttcgtatgttatagtttgtatgttgattaagaagcgtgttggtcgggcgcggtggtttacgtttttaattttagtattttgggaggttgaggtaggtggattacgaggttagaagtttaagattaatttggttaagatggtgaaatttcgtttttattaaaaaaaaaaaaaaaaaattagttgggtattgtggtaggtatttgtaattttagttattcgggaggttgaggtacgagaattatttgaatttagggggcggagattgtagtgagttaagattattttattgtattttagtttgagtaataagagtgaaatttcgttttaaaaaaaaaaaaaaaaaaaaaaaaaaaggtcgtacgcgttgatttacgtttgtagtattagtattttgggaggtcgaggcgggcggattacgaggttaggagattgagattattttggttaatacggtgaaatttcgtttttattgaaaaatataaaaaattggtcgggcgtggtggcgggtgtttgtagttttagttattcgggaggttgaggtaggagaatggtatgaattcgggaggcggagtttgtagtgagtttagttcgcgttattgtattttagtttggggaatagagcgagatttcgttttaaaaaaaaaaaaaaaaaaatgtacgtgagttttagggtttttgagtaggagagaggtgagagtagatacggtaggagttttagggtttttgagtaggaggaaggtgagagtagatatcgtagtagttttttttcggatttttttttaaggttatggtgttttgcgtagggtgtttttgttagtttttcgaggtttagtttagtagataaggtttttttttggaaataggaggtaaagttttgaaagttaagaaggttgggaaaggagtagggtttgggtagggttcgttaggcggcggtaggtgtagcgtgtttggttgcgataaggtagggatattttcggttatttttattagttgggagaggtttaggtcggttagtgttgttttaggtaggagttttttcgcgtatagatgtagaggcgttcgggatgtttagcggtagtttcgtgtttgaagaagttagttggaaaagtaaggtttttcggatgtaattcgggagggaggtatagtttttttcgggtagggtttttagtttcgggggttagggatgtttttagcgttatatttttggtaaatgaggaaaggttacgttttttttttgttgattgataagtcggtgtaaatagttatttttggtagtttagggtttttttttgataggataaataaattatatttcgtttggtttcggtaacggttatatattgcgtagaaaacgtgttggcggtcgtatataaattttcggggtttaaataaatataggttgattttattgggcgtttttgttttttggatagttgggggagttaaggggttagttttaggggattgggggtcgttttttttttaggagggtttcgttattagggtattttaattggagtttaagagtttatgtaaacgtacgtttcgttgcgataattggttttgtttgagtgaaagttcgtaacgtaggtttttaattacgttttttttggtacggaggatataggcgttagacgggtttagtttagggtgttaagaggaagtaagggagggagggaggagagaaggaaggaagatagaattattagtatcgtgattggttcggttcggtttcgattttagtaagttatatttatttttttacgttggttttttcgttggggatttttcgtaattttttttttttgaggattttgacggtttttttgtatagcgttttcgagtttagtattttttttattttgtcgtaagagtttttttttagtaggttttttattaggtatttgtcgatgagtttggttcgtttgcggcgcggttggtagatgatttcggtggagtcgatgcggtggatgaacgtgtttatatttatcgatattagttcgtttttcgtgaatatgtttagttgttgcgggtttattatttttatgttggatttagggttttggagtttcgtcgttagttttgagttcgcgggtgagcggtttttttttgtgtttcgattttttttttttaaaattttataaagaaaaaagaaaaaaaaaaggtaataaaaattttaaaaggaagggaaaaattttttttttaatagaaacgattgttttatacgttagtttcggttgcgagtttaagttcggtgtagggtttgcggatcggcgggtatcgggggttcgggacggcggtttagacgcgagttttagtgggattcgggttttagaattgggagacggttcggttagggttaatttcgttttcggggattttggggaggtcggtcggggttttttagtgttaggttatttttcggggattttaggtttacggataagtatgaatacggtcgagcgtagtttttttcgggtcgtttattttataggtcgggttcgcgacgtcgttatttttcgggatttttatatttggagagtttaatttcgttgggggcgttttcggcgacgtttcggttttatcgtttgttttaggagtaaacgtttcgtcgcggacgatcgagcggatttttcggggggcgtcgattttcgtcggttcgggcgagcgttcggggggttgggggcgttcgggaggtttttcgtcgcggttaatagtttcgtttagggttggtcgttgttcggcgttcgcgagggttcgtattgggcgtttttcgagtcggttcgcgatttttaaggtggtcgtcggggttcggtaggcgttttttttttcgtaaacgtttgttcgagcgcgcgtttcgtttcgagtgtttttagcgttcggttcgcggggcggcgcggcggcgggggttttacggggttttcggcggtcgaggcggcgtaggtcgtaggtttcgggtcggggggttttcgaaggtgtcgggtttcgggcggcgcgtttttttcgtcgcggtcgtcgcgcgtgtggaggaggcggagcggcgaggggggtttagtttatttaaggtcgcggtagtaagtgtcgttattcgcgtttttttcgtcgtttcgcgttttattcgcgggcgtttcgggtcgtttttttttttcgcgttcgatacgtcgtcgttattttgtttatttttttttttttttttgcgtcgtcgcggatatcgtacgttcggtcgtagggtacgttttttcgcgaggacgacgtgtttattcgttggttgaatttgttattttcggttttttgttcgtttcgtcgtcgttgacgattggagcgtttggattcggtcgggcgttcgagcggcgattggtcggcgtttggtttcgttcgaggggtggatatagcgcgtttattggttttcggagacgttcgttacgggtagggggcgggaagtaggtatggggagacgaggttacggttgtgatttcggtggggttcgggaagggggtcgtaggttacgggtgttaacggtttttttgaacggtcgtagggtgggttgagttcggtgggcgggaatttgggtttgcggatttggaaggagcggggttatttttattagagtttttttttcgtatttttttttggggcgaggttaagggttaaaaagtaatataaagtggttaattttagttaaaaattttttttttgagttatttttggattaggggaaagagaaacgtttagggcggtttttgttttatcggaatttatgggggaagttttaggatagcgttgggataagtttagcgggggtttttcgtgaaaaataagagttgttaaaatatggtttgataaggttgaaaatattgaatttttttgtgttagtttcgtgttttttatttttttttgtattagcgttaggttgtttagttggaataaattattttggtataattttcgttttttggttttaagcgatttttttgttttagtttttttagtagttgagattataggcgtgcgttattacgttcggttaatttttgtatttttagtagaaattataggtgtatgtttgtaattttagttatttagaaggttgagggaggagaatcgtttgaattcgggaggaggaggttgcggtgagtcgagatcgtgttattgtattttagtttgggtaataagagcgaaattttgttttaaaaaaaaaaaaaagattttttttagaaaattgaagttgaaggaatattttttaatttaaatttattttggtattttttttttgtattgattgttggtttatattttaattttttggaatttggagataatgttggataattggtatcggtaggttttacgtttttttagagaattgtaggatatatggaagtgatttaggaaatatttggtgattattatagatagaatttttgaagatggatttttcgtttaaagattattttttttaagaattttttttagttatttttttaagtgtttggacggagatgtgttgtgagtgtgaattatatacggaatttttttgtttttttgatacgtataattttattataaaatgttaaaaaatgtagtattttaaaaaacgtaagatgtattgttgatattaatttttataagtgtgttgtgttgttatatataataaattttttaaaaattattaaatatttagggatattaggtagggtgcggtggtttatatttgtaattttagtattttgggaggtcgaagtaggcggattacgaggttaggagtttgaaagtagtttggttaatatggtgaaattttatttttattaaaaatataaaaattagttgagcgtggtggtatgtgtttgtaattttagttatttaggaggttgaggtaggagaattgtttgaattaggattcgggaggcggaggttgcggtgagtcgagattacgttattgtattttagtttaggtaataagagcgaaattttgttttaaaaaaaagaaaagaaaagaaaagtattttttgtatagagaattttatgagttatacgaaaatttgtatagttttatattgaagttaatattgagttgtattagaatttatatttttagtaaaataagtttattgtataggtattattaaaggatagttatttattttttatttttattttttttttttttatttttattttttttttttttttttttttttttattttttggtttgtttttttttgagttttttttttttgttttatttttgtttttagtacgatatgtagtaatattttttttatattttttttgtagtttaattgttttttgtttatatggttgtttatttttggttgattgtttagattatattttatttagtttttttgtagtttttacgataaataggtttgggtgtttatttttgatttttgggcgatgtttagagtaaaataggaagaaggtagatggtggttttttaggagtattgcgattttttttttttttttttttatttttttttatatttcggaggaatgtaatttttaatttttttgttatagcgagttttgttattttttgttttttttttaaattttattttttttttgtagacgtggttttttatttttttaaatattttttggagaattttacgaaattgatagaagagttcgggtgtttttttttgtgttttttttggtaggtttgcgcgaagagggtatacgaggatattttgtttttcggtttgttggggtgttttttatttatggggatagaatagtatttatttggtgcgagtttttttttagagttttatagagtattcggatttaatagagatatttttttttatattgattttttttttttttttttgagacggagtttcgttttgttgttcgggttggagtgtaatggtatgattttggtttattgtaatttttgttttttagatttaagtaatttttttgttttagtttttggagtagttgggattataggtatatattattatggttggataatttttggatttttaatagagatagggttttattatattgtttaggttggtttcgaatttttaattttaggtgatttatttgtttcggttttttaaagttttgggattataggtatgaggtattatgtttgttttatatattgaatttttaaagttagaaaaattaaaaatgggtttgttaggtacggtagtttatatttgtaattttagtattttgggaggtcgaggcggatggattattcgaggttaggagtttgagattagtttggttaacgtggtaaaattttgtttttattaaaaatataaaaattagttaggcgtggtggcgggcgttcgtaattttagttatttgggaggttgaggtaggaggatcgtttgaatttaggaggtagaggttgtagggagttgagattttgttattgtattttattttgggtaataatgagatttcgtttcgaaagaaaaaaaaatgggtttggtatggcggtttttgtttgtaattttagtattttggggggttaaggtaggtgattatttgaggttaagagtttaagattagtttgggtaatatggtaaaattttcgtttttattaaaaatataaaaattagttaggtgtcgtggcgttcgtttgtaattttagttatttaggaggttgaggtaagagaatcgtttgaatttgggaggtagaggttgtagtgagttaagattgtgttattgtattgtagtttgggtaatatagtgagattcggttttaaaaaaaaaaaaaaagggtataaataaaatattttattggttagatatagtggtttacgtttgtaattttagtattttaggaggttaaggtgggttgattacgaggttaggagttcgagattattttggttaacgtggtgaaatttggtttttattaaaaatataaaaattagttgggcgtggtggcgggtatttgtaattttagttattcgggaggttgagataggagaaaggcgtgaatttaggaggcggagtttgtagtgaattaagatcgcgttatcgtattttagtttgggagatagagcgagatttcgttttaaaaaaataaataaataaaaataaaataaaatattttattaataattttaataatgattgtatgttgaaatgatgtaattttggatatgttaggttaaagtaaatgtattattaaaattaattattttagggttatgtatagtggtttatatttgtaattttagaattttgggaggattttttgagtttaggagtttgaggttagtttgggtaatatagtaagaatttgttttaaaaaaaaataaatatataaataataggttaggtgtagtggtttacgtttgtaattttagtattttgggagg

SEQ ID NO: 192 - DNA, 1157 bp, Artificial Sequence
  chemically treated genomic DNA (Homo sapiens)
ggattttgttttttttgaaggttttagggaagagtgttttttgtttttttcgaaggttttagggaagggtttgtttttttaggtttttggtggtttgtaggtgtagttttttaatttttttttttaagcggtttgttgtttataaggatacgagttatattggatgaggggtttattaattgatggtttttgtaaagtttttatttttaaataaggttatattgtgaggtattgggagttaggattttaatatagtttttttggtggatataatttaatttttaataacgtttatataattttaagtagggtttggtattttgtgtgttttttggagagcggttgagttaggttttggtagtgtttaggttatcggtgattgtagtttttggacggtatcgtttattataggttttggaggttgtttttacggttttttgatagggtttttgttggtttgggggtttttgattaggggagcggttttaggaggggagagattcgcgtttcgggtttagcgtagtcgtttcgagtaggatcgggatttttattaagcgggcgtcgttttacgattttcgcgcgtttttaggattattcgggtacgtggtaggtcgtttgtacgttcgcggattatttttgtgataggaaaaggtacgggttatttggtaaattaaggtatagagttttaggcggaagttgggaaggcgtcgttcggtttgtatcggtcgaagggttattcgggttaggcgtatagggtagcggcgttgtcggaggattagggtcggcgtgtcggcgtttagcgaggatgcgtagattgttttaggttcggcgtcgtcgtattgggtatgcgtcgattcggtcgggcgggaatatttcgtttcgttcgggtttcgttttagtttcgttttcgcgcgtttcggtttcgttttcgcgcgtttttttgttttttttaggttttcggtttcgtttcgttttagatttcgttttacgtcgttattttcgtgtttttcggtttcgttttcgcgtttcggatatgttgggatagttcgcgtttttagaacgttttgcgtttcgacgttcgtaggttttcgcggtgcgtatcgtttgcgatttggtgagtgtttgggtcgtttcgttttcggaagagtgcggagttt

SEQ ID NO: 193 - DNA, 1157 bp, Artificial Sequence
  chemically treated genomic DNA (Homo sapiens)
gagtttcgtattttttcgggagcgaggcgatttagatatttattaagtcgtaaacggtgcgtatcgcgaggatttgcgggcgtcgggacgtaaagcgttttaggggcgcgggttgttttagtatattcggggcgcgggggcggggtcgaggggtacggggatggcggcgtggggcggggtttagagcggggcggagtcgaggatttgagaaaagtaagagagcgcgcgggggcggggtcggggcgcgcgggggcggagttggggcggagttcgggcggggcggggtgttttcgttcgatcgggtcggcgtatgtttagtgcggcggcgtcgggtttgaggtagtttgcgtattttcgttggacgtcggtacgtcggttttggtttttcggtagcgtcgttgttttgtgcgtttgattcggatggtttttcggtcggtataagtcgggcggcgtttttttagttttcgtttgaggttttgtgttttagtttgttaaatggttcgtatttttttttgttatagggatagttcgcgggcgtgtaagcgatttgttacgtgttcgagtggttttgaaagcgcgcgggggtcgtaggacggcgttcgtttagtgagaatttcggttttgttcggggcggttacgttgagttcggagcgcgagtttttttttttttggggtcgtttttttagttagggatttttagattagtagagattttgttagggggtcgtgggggtagtttttagggtttgtggtgggcgatgtcgtttaggggttgtagttatcgatggtttagatattgttagagtttgatttagtcgttttttagagagtatatagggtgttaggttttgtttggggttgtgtggacgttattaggagttgaattgtgtttattagagaagttatgttggagttttaatttttagtattttataatgtgattttatttggagatggggattttatagaagttattaattagtgggttttttatttagtatgattcgtgtttttataggtagtaggtcgtttggggaggaggattggagggttgtatttgtaagttattagaagtttaagaggatagatttttttttggagttttcggagggagtagaggatatttttttttggagtttttagagggagtaggattt

SEQ ID NO: 194 - DNA, 8093 bp, Artificial Sequence
  chemically treated genomic DNA (Homo sapiens)
ttatggaaggaaatgagattagttagcgagttgatatagaataaggtagtttaaaataaatttttttaaaaatacgaagaatagatattgaagggaagaggtgtttgtaaagattaagaaagtatatttggagatggtatttttttaaagttaaagttattaagtgtttaagtgttttaaggagggtaagattattaataaggatttagtatagtagagtaatttgagtggtaatacgggatattgggaatataaatttgttaagaaaattagtaggaatgagttataggatagtaattggtaaggatttaataattttttttttaatgtacgtattttaattatatttattgttataataggattagtaataattatatttatttaaaaaaaaaaagattgttatgtagttatagaattatttaatatagaaaatagtaaaatatatttttttttttttttttttttttttttttttttataaataagattagtttatagtaaattttttatagttaagggttaatttaaaatttttggtttatattttttttttatttaatgattatatgatgtaaattaattttattaatattttaagtaaaatatattggaattttataaaatgtataagattttaatatttaaggaattggggttagaaagtagaagtggtttttaggttttttagttttttttttaagtaataaagttttgttgtgaatatttaaagttattgggaaattatcggtagatttttttgtttttttttttcggttttttattatgttgtttttttagatatgtaagtttattttattaattaaaattttagtttgattatttttgataagtatttaatcgatatgtaattttttttttgttttaaatatgtataataggatagagtttttaaatttgatttaattattaatttttgatttataagtgttatggtgagttaatagaatttattaatgtttttattgtattttattagttaaatttagaaggttggaattagttttttttatttagtattttgttagtttgtttagtttgtatttttaattttgtttttaatggtaatttgttttattttttgaaataaaataatttatattttgggagggttaattttttattgtgttaggttgttttatgtattgtaggggtgagtgtttttaggtttaaatgttaatagaagtttttagtaaatatgataattaaaaaagtgtttttatatattttttagtattttttggaatgataggttattgtttttagttgaaagttattggtataattttggtttttaagtttttatgttatttattttaattgtttagatattaattttatttaaatttttagttatagtttggttttttgaatttgttggattagtaattatagattaaggtgttttaatagttaagataggattttggaataagagtttttaaattgtataatatttgagaggatttatgaatataaattgggttttgtttataattagttttatataatgaattttaagattgtttttttatggtgaatagaagtttggaaattattgttttggtataaagtagattattttagtagaaatatagaattattgtaatttgtgaataagattgtttttaaatatttttatttgtgtgttattttatatatagaatgtgtacgatagttttaaattttagaataaatttatttttagtatttaataaaatttgatattgtattattttaaaataaagtgtttattttaggtaggattttttaaaataaagtagtaatatttacgtagataagataaaaaagttaaaatattttatattttttaattttggagtgtaattttttttttttatcgtttttgatagggttaaatttgtgtttatagtaaaaaaaaaaaaaaaaagaattattaattggtaattattaagattttatatttattatagttttttaataggtaagttgataaaatagtttttagttattaaaaaaaaaatttaaggaaaatttttaataattagttttatttttaaattgtatgaagttttttatatttgaaatttaaaaatgattttaatgattttttttattagtaatgtgttattattgaggtgggtgatggggagggaagagggaagaaatttgttagtattattttcgaatttagaaatgtttaaaaaaaagttttaaatattttgatggttagataaaatatttttattgttatgtatgggttttttttttggaaatttatgaatttgttatgtgagtttttgtaaattggtttaaaagtatatttaaggagttgataatttaagattatatgaattagaattttaatattttattaaaataagagttgaaatttttggtatttatttttagaatatttaaaaaatagattgtaaatttaatttatattaatattaaatttttttaaaattaattatattataaaagataatgattttgttattaaattaagttttaaaaaaggtggtatttttatgttttagttttatgttgttatttgagatgaaaaaaaaggtaattgttagaattttaattgtgattagtttggacggttggtatttggtatttttttataatttaaattagtaaatttgaaaatttaaattaatttttgtttttagaattaaatttttgttgagttttttaattttgtattataaagttttatggattagatttattttttttttttataaggttattttaatcgggttttattttagttgtggtaattcgaaatagggtttggagatgtttatttgttaatggttgatttaaagtgtgttggtttcgagttaaatatgaaaaagtttttttatagatttggttattattaaataaggatgttattttataggtaatttttttgataattgggtaggatttagtagataatttagtataaaattgttttaagtttttgattttgtatttattttaaagattagtgtttgtttgaagttttgttagttttatttttattgaaataggtgtatatttaggtttaaagttaaatggatttgaaaaaagttttaagttttttttaatgaatttgaggtttttaaaatgttttttaaattttttttggagacgatagattattatttgatatttattaggattaaatatttttttattttttttattttgttgttttagtttattaataatttttttgagggtaggaaagtttgttagatttttttttttaatatgtttttgaaataaatttagtttaatttcgaaagtataaatatggttaaaggtagtagtagtaaagattttattaattcgtaattttttattgagttttcgaaggtgttttataatgtttattaagaagttaaagttataaagttattgtttgtttgagaagtggattgttgttgtttttattgaaattaagaacgtttttatttttttttttagagagaatattagttttaaagtttttttttttttaagttaattgtttagatatcgtttattaatttttttattatgttttgatttagatttcgttagtaaagtttgaaatttaggtcgtttaacgtttttggttttaattaaaattatttattcggatatggtatttatgatttgattaatatttatattataggagtttaatagttttaagtgaagaaattttgaataatgaatgatattttaatagttggggtttacggtttttttttttatgtatgagacgagttttgagtttttattaattatttttaaagtatgggtcgtggttagtttaattattttttgtaagttaagttttgttgtttgtagggattttaggattgtcgatatgagcgtattaatattgaaatgatgagttaggttgattatggttagaagatttttttgtatttttaatttagggtttatatcgcggataaagattaggaggtagtttttataggttataaaagtttggtcgtttaaggtaagagaataggttttaaagtttttggttcggttaaaaagttggttgcgtagatttttgttaatgtttaggattttttgttttgtgatatttggagataagttaacgttttgtaggacgtttatatgttcgggtagtattttttttagtaatatttttatgtattggtatataaagttttttttattttagtcgcgattttttaaggttaagaggcggtagagttcgaggtttgtacgagtagttttttttttaggagtgaaggaggttacgggtaagtcgttttgacgtagacgttttattagggtcgcgcgttcgtcgttcgttatatatcgttcgtagtattcgtgtttagtttcgtagtggcgtttgacgtcgcgttcgcgggtagttacgatgaggcggcgatagattaggtatagggttttatcgtttttcggaggttttattattaaataacgttgggtttattcgggtcggaaaattagagtttcgtcgatttttattttgttttttttgggcgttatttatattttgcgggaggttataagagtagggttaacgttagaaaggtcgtaaggggagaggaggagtttgagaagcgttaagtatttttttcgttttgcgttagattattttagtagaggtatataagttcggtttcggtatttttgtttttattggttggatatttcgtatttttcgagtttttaaaaacgaattaataggaagagcggatagcgatttttaacgcgtaagcgtatatttttttaggtagcgggtagtagtcgttttagggagggacgaagagatttagtaatttatagagttgagaaatttgattggtatttaagttgtttaattaatagttgtcgttgaagggtggggttggatggcgtaagttatagttgaaggaagaacgtgagtacgaggtattgaggtgattggttgaaggtattttcgttgagtatttagacgtttttttggtttttttggcgttaaaatgtcgttcgtggtaggggttattcggcggttggacgagatagtggtgaatcgtatcgcggcgggggaagttatttagcggttagttaatgttattaaagagatgattgagaattggtacggagggagtcgagtcgggtttatttaagggttacgatttaacgggtcgcgttatttaatggcgcggatacgtttttttgttcgggtagaggtatgtatagcgtatgtttataacggcggaggtcgtcgggttttttgacgtgttagttaggtttttttttttttcgtagatcgtgtgtttttttatcgttttttttcgagattttttaagggttgtttggagtgtaagtggaggaatatacgtagtgttgttttaatggtatcgttaattaagtaaggaagttatttaatttaaaattatgtatgtagaatatgcgaagttaaaagatgtataaaagtttaagatggggagaaaaatttttttttagagggtattgtgttattgtttttttgttttttatttattttagaaattatttgtttatatttaaaggtataatttattttgagttttttttaaaataaatcgtttgtagttttaggataggttgatgtattttgggtttgatttttgattattttattgttaaattagtgattttttttagtgtttttttgttttttatttcggaggacgtatttcgaagatattagattttatgggttatttttggattttgaagtttataattgtgataaaaaatgtgaagggaagagatttgaaatatgtggaaggaaaagtgagtgtagattataaatttttaaaaagataagtttaaaatatatttaaacgttatgttagattattttgttaaaattagttgttagtgacgttcgtacgttaatagaaaaaagaatgttttagtttggagtggtaggtttttagagggatttattgtgaaagtataaattatttagggtaatgggattgagagaatagtgggtagaaaggattattgaaggaaaggaagagaattggaaggtagatgaaagaaggagtaagaatttggggatgtttttttttttttatttgtaatagtagtaatagaagtaatggtagattggtttttgtttttattgtgttagaatgaattgataggataattgggtttattattgtattgtgttagaatattgtaaaataaaattaaatatattagtttggtggtttgtaattaattatttaagtggagatttttattttttttttattttttttttagacggagttttattttgttatttaggttggagtgtagtggcgcgattttagttgattgtaattttttttttataggtttaagggagatttttttgttttagtttttcgagtagttaggattataggtatgtgttattatatttggttaattttgtatttttagtagagatgggatttttttatgttggttaggttggtgttaaaattttcgattttaggtgaatcgtttgttttagttttttaaagtgttgggattataggcgtgagttatcgcgttttgtagttttttgtatttttaatagagatagggttttattatgttagttaggatggtttcgattttttgattttaggtgatttgttcgttttggttttttaaagtgttgggattataagtatgagttatcgcgttcggtttaagtggagatttttatatggagtttagttatattttttttaatatataagttgagatgattaatataattttaatataggggtttatgagaaatgtttgtaatatttaagtaatttattgtttttttttttttttttttaagatgaagttttattttgttgtttaggcggaagtgtagtggcgtgattttggtttagggtaatttttgttttttggttttaagcgatttttttgttttagtttttcgagtagttgggagtataggcgtgtatgattatattcggttaatttttttatttttagtagagacggggtttttttatgttggtcgggttggttttgaatttttgattttaggtgattcgtttattttagtttttttaagtgttgggattataggtgtgagttttcgtgtttagtttattattttatttttgaataaagaattgtttgtgtggggaatagataatttttttttatgtagtttttgttagaaaatttgttttttttagtagttggtttgtgtttataggttattttttgaaagtataaaaaatttattgattttttttttttgggtttttttttttttttgagatagagttttgtttttgttgtttaggttggagtgtaatggcgcgattttagtttatcgtaatttttattttttgggtttaagtgatttttttgttttagttttttgagtagttgggattataggtatgcgttattatgtttggttaattttgtatttttagtataaatggggtttttttatgttggttaggttggttttaaatttttgattttaggtgatttattcgttttggttttttaaagtgttgggattatgggtgtgagttattgcgtttggttagaaaatttattgattttttaaagatttattaattttttgtattattttttttttttttttttatcgtaaatataaaagggaatagtagagaaaattatttagaattttattttttagtgatattatttagtgatattttattagagttatttaggaatttgaggttgaataaagtttaggtaaaagtaaaattagttgagaagagatatttgttaaaagaaatttatttttaattttatttgttgttttttttagaggaatagaaatagtgttgaatgttttattagaaatgatggttgttttgttcgtttttttttttttttttatataatatgtaaatttatatagtgtatgagtttgtaagataaaggaaaaatacgttaatgaggtattattgtttgtatttggagtttgttattattgtttggtttatattaaaatatgtatattagagtagttgtagattgataaattattttttgtttgatttgttagt

SEQ ID NO: 195 - DNA, 8093 bp, Artificial Sequence
  chemically treated genomic DNA (Homo sapiens)
attggtaaattaaatagaaaataatttattagtttgtaattattttaatgtatatattttaatatgagttaagtaatgataataaattttaaatataaataatagtgttttattaacgtgttttttttttgttttataggtttatatattgtatgagtttatatattgtgtgagagagagggaagagacgggtagagtaattattatttttaataggatatttagtattatttttgtttttttaggaaagatagtaagtgaagttaaaaatagattttttttggtagatgtttttttttaattaattttatttttatttgaattttatttagttttaggtttttaagtgattttaataaaatgttattaaataatgttattaaaaaataaaattttgaatgattttttttattatttttttttatatttacgatggaggggaaaaaaaaaagtaatgtagaaagttaataaatttttaggaagttaatgaattttttggttaggcgtaatggtttatatttataattttagtattttgggaggttaaggcgggtggattatttgaggttaggagtttgagattagtttgattaatatggagaaattttatttgtattaaaaatataaaattagttaggtatggtgacgtatgtttgtaattttagttatttaggaggttaaggtaggagaattatttgaatttaggaggtggaggttgcggtgagttgagatcgcgttattgtattttaatttgggtaataagggtaaaattttgttttaaaaaaaaaaaaaaatttaaaaaaaagaagttaataaattttttgtgtttttaaagagtagtttataagtatagattaattgttagagaaaataaattttttagtaggggttgtatgagaaagagttatttattttttatatagataattttttatttagaaataagataataggttgggtacgggggtttatatttgtaattttaatatttggggaggttgaggtgggcggattatttgaggttaggagtttaagattagttcggttaatatggagaaatttcgtttttattaaaaataaaaaaattagtcgggtgtggttatgtacgtttgtatttttagttattcgggaggttgaggtaggaagatcgtttgaaattaggaggtagaggttgttttgagttaagattacgttattgtattttcgtttgggtaatagagtaagattttattttaaaaaaaaaagaaagaagataataagttatttaaatattatagatattttttatgagtttttgtattgaagttgtattagttattttaatttatatattaaaaagagtataattggattttatataaaaatttttatttgagtcgggcgcggtggtttatgtttgtaattttagtattttgggaggttaaagcgggtagattatttgaggttaggaaatcgagattattttggttaatatggtgaaattttgtttttattaaaaatataaaaaattgtagggcgcggtggtttacgtttgtaattttagtattttggaaggttgaggtaggcggtttatttgagatcgagagttttgatattagtttgattaatatggagaaattttatttttattaaaaatataaaattagttaggtgtggtggtatatgtttatagttttagttattcgggaggttgaggtaggagaattttttttgaatttgtgaggaggaggttgtagttagttgagatcgcgttattgtattttagtttgggtgataaagtgagatttcgtttaaaaaaaaaataaaaaaaaaataaaaatttttatttaagtaattaattataagttattaagttagtatgtttagttttgttttatagtattttggtatagtataataataggtttagttgttttgttaatttattttaatatagtagaaataaaagttagtttgttattgtttttgttattattattataagtgaaaaggaaaaaatatttttaggtttttgtttttttttttatttattttttaatttttttttttttttttagtggttttttttatttattgtttttttagttttattgttttgaatagtttatatttttataataaatttttttagaaatttattattttaaattgaagtatttttttttttattaacgtacggacgttattaataattgattttaataaaataatttgatataacgtttaggtgtattttgggtttgtttttttggaagtttatagtttgtatttatttttttttttatatgttttaaattttttttttttatattttttgttatagttataagttttaaaatttaaggatgatttataaaatttggtattttcgaagtgcgtttttcgaaataaaggataggaaaatattaagaggggttattaatttaataatagggtaattagaagttaagtttaaagtgtattagtttgttttaaaattataaacgatttgttttgaaagaaatttaaaatgaattgtgtttttggatgtgaatagatgatttttggaatgaatgaaaagtaagaaaatagtaatatagtattttttgaaaaaaggtttttttttttattttaagtttttatatattttttaatttcgtatgttttgtatatataattttaaattaagtggtttttttatttagttaacggtattattaagataatattacgtatatttttttatttatattttaaataatttttaaaaggtttcgggggagagcggtaaagaaatatacggtttgcggaaaaggagaaggtttgattggtacgttagggaattcggcggttttcgtcgttgtgggtatgcgttgtatatgtttttgttcgggtaaagaggcgtgttcgcgttattgagtgacgcggttcgttaagtcgtagtttttaagtgagttcggttcgatttttttcgtattagtttttaattatttttttgatagtattagttggtcgttggataatttttttcgtcgcgatgcggtttattattgtttcgtttagtcgtcgaataatttttgttacgaacgatattttggcgttagaagagttaaggaaacgtttagatgtttaacggaagtgtttttagttaattattttagtgtttcgtgtttacgttttttttttagttgtagtttacgttatttagttttattttttagcggtagttattgattggatagtttgaatgttagttaaattttttaattttgtgggttgttgggttttttcgtttttttttgaagcggttattgttcgttatttagaaggatatgcgtttgcgcgttagagatcgttgttcgttttttttattggttcgtttttaggagttcggggaatacgaaatatttagttaataggagtagagatgtcggaatcgggtttgtgtgtttttgttgaggtgatttggcgtagagcggaggaggtgtttggcgttttttaggttttttttttttttttgcggtttttttaacgttggttttgtttttgtggtttttcgtagaatgtggatgacgtttaaaagaagtaagatggaagtcgacgaggttttagtttttcggttcgagtggatttagcgttatttggtggtggagttttcggagggcgatggggttttgtgtttggtttgtcgtcgttttatcgtagttattcgcgaacgcgacgttaggcgttattacgaggttgagtacgaatattacgagcggtatgtggcggacggcgagcgcgcggttttggtggagcgtttgcgttagggcgatttgttcgtggttttttttatttttgaagagagagttgttcgtgtaggtttcgggttttgtcgttttttggttttgaagggtcgcggttggggtgagggggattttgtatattagtgtatggaggtgttgttgagagaggtattgttcgagtatgtaagcgttttgtaaggcgttgatttatttttagatattataaggtagaggattttgagtattgataggaatttacgtaattagttttttaatcgagttagggattttaaagtttatttttttgttttggacgattaggtttttgtggtttatgagaattattttttggtttttattcgcggtgtaggttttgagttggaggtgtaagaagattttttgattataattaatttgatttattattttagtgttggtgcgtttatgtcggtaattttagagtttttgtagatagtagggtttagtttgtagagaatggttggattgattacgatttatattttgaggatgattggtgagaatttaggattcgttttatatatgagagaaaaggtcgtaagttttaattgttggaatgttatttattatttaggatttttttatttggaattgttgagtttttatgatgtagatgttaattagattataaatattatattcgaatggatagttttgattaagattagaggcgttaggcgatttgaattttagattttattaacggaatttgaattagagtatggtgaaagggttaatggacgatgtttgaataattggtttaggagagggaaaattttaaaattaatattttttttaagaaaagaaatggaagcgtttttggttttagtaggggtaataatagtttattttttagataaataatggttttgtgattttggttttttggtggatattatggaatattttcgagaatttagtgaagaattacgagttagtaaagtttttgttgttgttgtttttgattatatttgtattttcgaagttaagttgaatttattttaaagatatattgaggaaaaaaatttaatagatttttttgtttttagagaagttgttgatgagttaaaatagtaaaataaggaagatgaaaaaatatttgattttgataggtattaaatggtgatttgtcgtttttaaaaagaatttgagagatattttaaggattttaggtttattaaaaaggatttagaattttttttaaatttatttaattttaaatttgaatatgtatttattttagtgagggtggagttaataaaattttaggtaaatattaatttttggaatgaatatagaattaaagatttggggtagttttatgttggattgtttgttgaattttatttaattattaaaggggttgtttgtaaggtggtatttttgtttgatagtaattaaatttgtgaaaaggtttttttatatttgattcgaaattaatatattttgagttagttattaatagatgagtatttttaagttttgtttcgggttgttataattgaaatggagttcggttgggatgattttgtgagagaaagaaatgaatttaatttataaggttttgtagtataagattgaaaaatttaataagaatttaattttaaaagtaaaaattggtttgagtttttaagtttattaatttggattgtgagaaagtattaagtattagtcgtttaaattgattataattaaaattttgatagttgtttttttttttattttaaatggtagtatgggattgaaatatgagaatgttattttttttaaaatttagtttagtgataaagttattgttttttatgatatagttaattttaaagagatttagtattaatgtgagttgaatttgtagtttgttttttaggtgttttgaagataaatgttaaaaattttagtttttattttaatggagtgttaaaattttgatttatatagttttaaattattaattttttaaatgtgtttttgaattaatttgtagaagtttatatagtaagtttataagtttttaaaaaggaagtttatatataatagtggaggtgttttgtttaattattaaaatgtttgagatttttttttaaatatttttgagttcgaaggtaatattgatagatttttttttttttttttttttattatttattttagtgataatatattattgatagaggaagttattagaattatttttaagttttagatataggagattttatgtaatttggagataagattaattattgggggttttttttggattttttttttaataattgggggttattttattagtttgtttattaaaggattatggtaagtatagaattttaatggttgttagttagtaattttttttttttttttttttattgtagatataagtttggttttattaaaaacgatgaggaaaaaagattgtattttaggattaggaggtgtgagatattttagtttttttgttttatttgcgtgggtattgttgttttattttaaaaaattttgtttaaagtaaatattttgttttaaaatgatatagtattagattttgttagatgttagaaatggatttattttaaaatttggaattgtcgtatatattttatatgtaagatagtatataagtagaaatatttaaaagtagttttatttatagattgtagtaattttgtatttttattaagataatttgttttgtgttaaaatagtaatttttaaatttttgtttattatgaaaaggtaattttaaagtttattatgtaaaattaattataaataggatttaatttatatttatagatttttttaagtattatataatttaaaaatttttgttttaaagttttgttttaattattgaaatattttaatttgtggttattaatttagtaaatttaaggaattaggttatgattaagaatttaggtggaattgatgtttgggtaattaaaataaatggtataagagtttaaaaattaaagttgtgttagtggtttttaattagaggtagtaatttgttattttagaggatgttgagaaatgtgtaggggtatttttttggttgttatatttattaggggtttttgttggtatttaagtttaaagatatttatttttgtagtgtatgggatagtttggtataatgaagaattagtttttttaaaatgtagattattttattttaagggatagggtagattattattagaagtaaaattaaaagtataagttgggtaaattgatagaatattagataggagagattaattttaattttttaaatttggttagtaaagtgtaataaaggtattgataagttttgttagtttattatagtatttgtaaattaggaattaataattgaattagatttaagggttttgttttgttatatatatttaaggtagaaaaaaagttatatgtcgattaggtatttattaagaatggttaagttgagattttggttaatagagtaagtttatatatttagagaaataatatagtggaaaatcgaaaaaaaaaaatagaaaaatttatcggtaattttttaatagttttgaatatttatagtagagttttattatttgagagaaagattggaagatttgaaagttatttttgttttttaattttagttttttaaatattgaaattttgtatattttgtgaaattttagtatgttttgtttaaggtgttaataaaattagtttgtattatgtagttattgagtgagggggagatataagttaaggattttaaattgatttttagttatagagaatttgttataagttagttttgtttgtaaaaaaaaaaaaaaaaaaagaaaaagaaaaaagtgtattttattgttttttgtattaagtaattttgtaattgtatggtagtttttttttttttaaataaatatagttgttattggttttgttgtagtagtgaatatagttaaaatacgtatattaaaaaaaaaattattaggtttttattagttattgttttatagtttatttttattagtttttttgatagatttgtatttttagtgtttcgtattgttatttaaattgttttattatgttaagtttttgttaatagttttattttttttgaaatatttgaatatttgatgattttagttttgaggagatattatttttaggtgtgtttttttagtttttgtaggtattttttttttttaatatttgtttttcgtatttttaaaaaaatttgttttagattgttttgttttgtgttagttcgttagttgattttatttttttttatgg

SEQ ID NO: 196 - DNA, 6521 bp, Artificial Sequence
  chemically treated genomic DNA (Homo sapiens)
ataaaattatgtatgggtaaaagatttaattaggtgtagtttagaaaaacggattttttttttttttttgagatagagttttgttttgttatttaagttggagtgtagtggtgtaatttcggttaattgtaattttcgtttcgtaggtttaagtgatttttttgttttagtttttcgagtggttgggattataggcgtgtgttattattatatttgattaatttttgtagttttagtagagacgggagggttttattatgttggttaggttgtttttaaatttttgattttaggtgatttatttattttagtattttaaagtgttgggattataggcgtgagttattatgtttagatttaaattttttttgttttttttttttttttgggggtggggggtagggttttattttgttgtttaggttggagtgtagaggtttgattttggtttattgaaatttttattttttaggtttaagtaatttttttattttagtttttcgagtagttgggattataggcgtgtattattatatttggttaattttttgtatttttggtaaagacggggttttgttatgttgtttaagttgtttttgaatttttgggtttaagcgatttttttgttttatttttttaacgtgttggaattgtaggtatgagttattatgtttggaataaagttttattttttaagtggattatttaaaaaaatgttttatggttaggtacgttatttttttttagtttgggtaagtgagtcgagattgtgttattgcggtttggtttgagcgatagagggagattttattttagataaataaataaataaaattaaaataaatttaaatattttttatatgataaaattatttttaatggtaattataaaatgaataataagggttaagaaataaatttagtgaatattttttttttttgaattttgtaaatataattatgttagtataaaaatagttatgtattgtttaataatagggatatgttttgagaaatgagttattaggtaattttgttattgtgtaaatattatagagtgtatttttataaatttagatggtgtagtttattatttatttaggttatatggtatagtttggtgtttttaggttttaatgtttatagtatgttattatattgaatattgtaggtagttgtaagataatggtatttgtgtatttattgtagagatagggttttttcgtttgtcgtttaggttggagtgtagtggtataattatagttttttgtagtttttaatttttgggtttaagtgatttttttattttagttttttaagtagttaggattatacgtttgtgttattaggtttgtttattgtttttgtttgttttttggtagagatggagggttttattatattgtttagattggttttgaatttttggttttaagtaatttttttgttgttttggtttttaaagtgttggtattataggaatgagttaaaagtttaatatggttgttgaataaaagattgatttaattaagtacggattttgtttttatggagttgaaggtcgttagagtagataaaatgagttattatttttatatgagttagacggtggataaagttattattgagggtaggtaaagaattgggttggtttaaagatgttagggattttttttagattagtggtagagggttggttaaggagttttttgaaggaggtggttttttatttgagttttaaagaatagaagagattagatagggaggatagtaaaatttttttttttttttgaaatagtttcgttttgtcgtttaggttggagtgtagtggcgcgattttggtttattataagttttgttttttgggtttacgttatttttttgttttagttttttgagtagttgggattataggcggtcgttattacgttcggttaatttttttttttttttttttttagtagagacggggttttattatgttagcgacgatttttgtttgtttgtttgtttttgagatagagttttattttgtcgattaggttggagtgtagtggcgcgatttcggtttattgtaatttttgttttttaggtttaagtgatttttttgttttagttttttgagtagttgagattataggtgtttgttattatgtttagttaatttttgtatttttagtagagacggggttttattatgttggttaggttggtttcgaatttttgattttaggtgatttgtatatttcggttttttaaagtgttggtattagaggtatgagttattgtatttggttagtaaaattatttgtgatatagtagtaagtgtataagtattgatttattagagttgaaggtggttgaggtatttaagtgggtttttggggattttgttatgttagggaatatttttttagataagggattaggaggtttggagggtttttaaggaagagttagggtagtaggggtattttggagttaggggttatggttatatgttaataggattagaaatattttaatgtatttaattaatttatataattatattggtgggtgtttattgaatattagttttagatatggatttgaaatggttttatttttttttagtttgtttaagttaatggagttttattagaatgtgagttataaaatagtagagttattttttatttaatgttgtatttgtagggtttagaatagtatttgaaggattggcggaggtttaataaattgttaaaagggtagattagttaggtgtgatggcgtgtgtttgtagttttagttatttgggaggttgaggtaggaggattatttgattttaggatttttgggttgtagtgtagtatattagttaggtgtttgtattaagttttgtattaatttggttgtttaaggatggttgaattgatttaggtggaaattggagtaggttaaaatttaatgttgattagtaatagggtcgtatttgtaaatagttatcgttttttagtttgggtaatatagtgagattttatttttaaaataaattttaaaaataattaattagaaaaaaaaattagtttgtaattttagtattttgggaggttaaggcgggtagattatttgaggttaggagtttaagataagtttggttaatatggtaaaattttaatttttattaaaaatataaaaattagttgggcgtggtggtaggtgtttgtagttttagttatttaggaggttgaggtaagagaatcgtttgaatttgggaggtggagattgtagtgggtcgagatcgcgttattttattttagtttgggtagtagagtgcgattttgttttaaaaaaaaaaaaaaagaaagaaaagaaaagaaaaagaaaagaaaagaaaaaaattgggaggtttaagtttatttttggtgtttttatatttttttgttttatttttttgtatttagtttttttttgtaatttgtgttttatattagtttttaagtttttaacgtgatttagtatgagaattggattttgttatttttttgtttataatattttatgttttttttttgtttagaatattattttttttattgtttttattaatggaattggtatttttttaaggatatgattaaatttgtttatttttatattattttttaaagtagaatttatttttttttttttaatatgatgatattgatagggtttgtttttatttattagattgtgagttgtttagggtaggtagcgttttttgtttttgtttttgttttttttttttgagatagggttttgttttgttatttaggttagagtgtaatggtatagttttagtttattgtagttttaatcgtttcggtttaaattattattttattttagttttttgagtagttgggattataggtatatgttattatatttggttaatttttttgtatttttagtagagatagggtttggttatgttgttcgggttggtttcgaatttttggatttaagtaatttatttattttagttttttaaaatgagggatcgtgttttatttatttttatgtttttagtttatagtttagtgttggatttatggtagtattaaataaatatttgttgaatgtaatagtaaatagtattttagggagtaagaattagattaataaaggtggtaaaaggtttggagaaaaaaataatagtttaatttggttagagtatgagggagagtagtaggagataagatggaaaggttttttgggtaaggttttgaaggaagttggaagttagaagtatataatgtgtatatcgtggtaggtagtggggagttaatgaaggtttttgagtaggagagtaatgtgttgaaaaataaatataggttaaatttattagagtttttttgatatatatatttgttttttatttaagtttaagtttgttttttatatatttattatttaatttattttcgggtttttttagtagtttgttttatttttttatttgttttttggtggagttagggatgtatatatgagttgtttttttttttagttagaggatatgggggttttagtttttttgtttttttttttttgtgtttggagttgggaagtaggttagggttagttgaggttggttggtaagtagttgggtggtgttagggagagtttgtatagtgttaggtggtgttttgggttttaagttgagtttatggtttcgataattttttgtttgtgtatatatttgttttttattttatttttattttagttttggtatgggggagagggtatagggttagataaatttgtgagattttggttttatttttgtaaaagggcgttttgtgagttagtttgtttttttttaggtttgttttttttttatttagttttcgtttttaatgtacgtatagttcgtatatatcgtgtgttgggatattttatagttagtcgtatggtttttttgtgttttagtttttggttttttttgttgatttcggtttttgttttaggttttattgtgtaattgttgttgttattgttgtttttggtgtttgtttatttttagaggttgtttcggatgtaggaggatttttttttgggaggaggtttttttggggaagatgatttattgggcgaggaggatttgtttagtgaagaggatttatttagagaggaggatttattcggagaggaggatttatttggagaggaggatttatttggagaggaggatttatttgaagttaagtttaaattagaagaagagggttttttgaagttagaggatttatttattgttgaggtttttggagatttttaagaattttagaataatgtttatagggataaagaaggtaagtggttattaatttttaaatttaggttttaggaggtttatgattttttttttatattttagtttaggttttgtttatttagggaaggaggggagattgtattttttatagaagtttttttagaggttttatattaatatttttatttttattttcggaggtagaaagggatagatgtggagagaaaataaaaagggtgtaaaaggagagaggtgagttggatgagatgggagagaagggggaggttggagaagagaaagggatgagaattgtagatgagagaaaaaatgtgtagatagaggaaaaaaataggtggagaaggagagttagagagtttgaggggaagagaaaaggaaagtttgggaggtgaagtgggtattagagataagtaagaagagttggtagaagttattttattttaggttataatgaggaaattgagatttaggaagaagggatatagtaggtagagaaacgtggttttttgatttttaagttaggaatttggggaaaggggttggagattatataaggtagagggatgagtggggagaagaaagaagggagaaaggaaagatggtgtatttatttatttgggatttaggattgaagtgtttatttattttttttttttttttttttgagataaatttttatttttgttgtttaggttggagtgtaatggcgcgatttcggtttattgtaatttttatttttcgggtttaagtgatttttttgttttagtttttagttaagtagttgcgattataggtatgcgttattacgttcggttaatttttgtatttttagtagagacggggtttcgttatgttggttaggttggtttcgaatttttgattttaggtgatttaattattttggttttttaaagtgttgggattataggcgtgagttatagcgtttggtttgaagtagttatttatttttatagattttaagataatgattgtaagttggtaggattgttgtttggtttatttagttgcggtgttgagtttgggtgcggttttttgtgttttgtatttggttcgtttaaggtatttgttattcgtaatgtttttgtaaggtatttgcgtttgtgatatcgttttggtcgttaggaagggattggggttttaagtttgagcggtttattttttttatttatatagg

SEQ ID NO: 197 - DNA, 6521 bp, Artificial Sequence
  chemically treated genomic DNA (Homo sapiens)
tttgtataaatgaaaaggatgaatcgtttaagtttagagttttaatttttttttggcgattaaaacgatgttataaacgtagatgttttataggagtattacgggtaataaatgttttaagcgggttaggtgtaaagtataggagatcgtatttaaatttaatatcgtagttgggtgggttaaatagtaattttattagtttgtaattattgttttagggtttgtaaaagtgagtggttgttttaggttaggcgttgtggtttacgtttataattttagtattttgggaggttagggtggttggattatttgagattaggagttcgagattagtttgattaatatggcgaaatttcgtttttattaaaaatataaaaattagtcgggcgtggtggcgtatgtttgtaatcgtagttatttggttagaggttgaggtaggagaattatttgaattcgggaggtggaggttgtagtgagtcgagatcgcgttattgtattttagtttgggtaataaaagtgaaagtttgttttaaaaaaaaaaaaaaaaaaagtgagtgggtattttagttttgagttttaaatgagtgagtatattattttttttttttttttttttttttttttttatttatttttttgttttgtatggtttttaatttttttttttaaatttttggtttgggagttaagaagttacgtttttttatttgttgtgttttttttttttaggttttaatttttttattgtagtttaagatgagatgatttttattagttttttttgtttgtttttggtatttattttattttttaagtttttttttttttttttttttaaattttttgattttttttttttatttattttttttttttgtttgtatatttttttttttatttgtagtttttattttttttttttttttagtttttttttttttttttattttatttagtttatttttttttttttgtattttttttattttttttttatatttgtttttttttattttcgagagtggggatggggatattggtatgggatttttggaagggtttttgtggggagtatagttttttttttttttttgagtgaatagagtttaggttggggtatgggaggggagttatgaattttttggaatttggatttggagattgatgattatttattttttttgtttttgtgggtattattttggggtttttgaggatttttaggagttttaatagtaggtagattttttaattttagggagttttttttttttgatttaggtttaattttaggtagatttttttttttaggtagatttttttttttaggtagattttttttttcgggtggatttttttttttgggtgaattttttttattgggtagatttttttcgtttagtgggttattttttttagaagagtttttttttaagggggaatttttttgtattcggggtaatttttggggatggataggtattagaagtagtagtgatagtagtagttgtatagtgaggtttggagtaggggtcgggattaatagagggagttaggggttggggtataggggagttatgcggttgattgtggggtgttttagtatacggtgtgtacgggttgtacgtgtattggaaacgagagttgggtgggggaggagtaagtttggaggggagtaggttgatttatagagcgtttttttgtagagatggagttaaagttttataggtttgtttggttttgtgtttttttttttatattaaagttaggatgggggtggagtgaggggtaggtgtgtgtataggtagaaggttatcggggttatggatttagtttggaatttaaggtattatttggtattatgtaggttttttttggtattatttagttgtttgttagttagttttagttaattttggtttgttttttagttttaggtatagaaggggaaaggtaggggagttggggtttttatgttttttggttgagagggaaagtagtttatgtatatatttttgattttattaggaagtaggtaaagaggtagggtaggttgttaggggagttcgagggtgagttaagtaatgggtatgtgggagataaatttgagtttgaatgaaaagtaagtgtatgtgttagaggggttttgataggtttaatttatatttattttttaatatattatttttttgtttaaaagtttttattggttttttattgtttgttacgatatgtatattgtgtatttttgatttttaattttttttaaaattttgtttaagagatttttttattttgttttttattatttttttttatattttagttaaattaaattattatttttttttttaaattttttattatttttgttaatttagtttttgttttttgaaatgttatttattattgtatttaataaatatttatttagtattattataggtttagtattgggttatggattagggatatggaaatgaataagatacggttttttattttgggaggttgaggtgggtggattgtttgagtttaggagttcgagattagttcgggtaatatggttaaattttgtttttattagaaatataaaaaaattagttaggtgtaatggtatgtgtttgtagttttagttatttaggaggttgaaatgggatgatggtttgagtcgaggcggttgaggttgtagtgagttgagattgtattattgtattttggtttgggtgatagagtaagattttgttttaaaaaagaaaaataaaaataaaaataaaaaacgttatttgttttgagtagtttataatttagtgagtgagggtaaattttgttaatattattatattgagggaagagagatgaattttgttttagaagataatatagaagtaggtaaatttgattatgtttttgaagaaatattagttttattggtaaaaataatagggagaatgatattttgggtaaagggaaggtataaaatattatgagtaggagagtgatagaatttagtttttatattaggttacgttgagggtttgagggttagtatggagtatagattgtaggggaagattgggtgtaaggagatggggtagaagagtgtgaggatattaagaatgggtttaggttttttagtttttttttttttttttttttttttttttttttttttttttttttttttttttgagatagagtcgtattttgttatttaggttggagtgaagtggcgcgatttcggtttattgtaatttttattttttaggtttaagcgatttttttgttttagttttttgggtagttgggattataggtatttgttattacgtttagttaatttttgtatttttggtagagattggggttttgttatgttggttaggtttgttttgaatttttgattttaggtgatttgttcgttttggttttttaaagtgttgggattataggttggtttttttttttaattaattatttttaaaatttattttagagatgggattttattgtgttgtttaggttggagggcggtggttatttataggtgcgattttgttattgattagtattgagttttgatttgttttaatttttatttgggttagtttaattatttttaggtaattaggttgatgtagaatttagtgtagatatttgattggtatattatattatagtttagaaattttgggattaagtgatttttttgttttagttttttaagtagttgggattataggtatacgttattatatttggttagtttgtttttttaataatttattaagttttcgttagttttttaggtgttgttttaggttttatagatgtagtattgaatagagaatagttttattgttttgtagtttatattttagtaaggttttattggtttaaataaattaaaagagaataaggttattttaggtttatatttagggttaatatttagtaggtatttattaatatggttgtgtaggttaattaaatatattaagatatttttaattttgttggtatatagttatggtttttagttttagggtatttttgttattttagtttttttttagggattttttagattttttgattttttatttaaagaggtattttttggtataatagagtttttaggagtttatttgagtgttttagttatttttaattttgataggttagtgtttgtgtatttgttgttgtgttataaatagttttattggttaggtgtagtggtttatgtttttaatattagtattttgggaggtcgaggtgtgtagattatttgaggttaggagttcgagattagtttggttaatatggtgaaatttcgtttttattaaaaatataaaaattagttgggtatggtggtaggtatttgtaattttagttatttaggaggttgaggtaggagaattatttgaatttgggaggtagaggttgtagtgagtcgagatcgcgttattgtattttagtttgatcgatagagtgagattttgttttaaaaataaataaatagataaaaatcgtcgttaatatagtgaaatttcgtttttattgaaaaaaaaaaaaaaaaaaaattagtcgggcgtggtggcggtcgtttgtagttttagttatttaggaggttgaggtaggagaatggcgtgaatttaggaggtaaagtttgtagtaagttaagatcgcgttattgtattttagtttgggcgataaagcgagattgttttaaaaaaaaaaaaaaattttattgttttttttgtttaattttttttgttttttgaaatttagatgaaaggttattttttttaggaaattttttaattaattttttattattagtttggaaaagatttttggtatttttgagttaatttagttttttgtttgtttttaataataattttgtttatcgtttaatttatataagggtgataatttattttatttgttttaacggtttttagttttataagggtagggttcgtatttgattgagttagttttttatttaatagttatattgagtttttggtttatttttgtaatattagtattttggaggttaaggtagtaggaggattgtttgaggttaggagtttaaaattagtttgagtaatatagtgagattttttatttttattaaaaaataaataaaaatagtagataggtttgatgatataagcgtgtagttttagttatttgggagattgaggtgggaggattatttgagtttaggagttggaggttgtagggagttatgattatgttattgtattttagtttgggcgatagacggagagattttgtttttatagtagatgtataaatattattgttttataattgtttatagtatttagtatggtaatatgttgtaagtattggggtttaggagtattaggttatattatgtagtttagatgggtaataggttatattatttaggtttgtgaaaatatattttatgatgtttgtataatgataaaattgtttagtgatttattttttagaatatatttttgttgttaagtaatgtatggttgtttttatgttgatatgattatatttataaagtttaaggaaagaaaatatttattgagtttattttttggtttttattatttattttataattgttattgagaataattttgttatataaagaatgtttaaatttgttttaattttatttatttatttatttgagatggagtttttttttgtcgtttagattagatcgtagtggtataatttcggtttatttgtttaggttggagagaagtggcgtgtttggttataaagtatttttttaaatgatttatttgaaaaataaaattttgttttaggtatggtggtttatgtttgtaattttagtacgttgggagggtgaggtaagaggatcgtttgagtttaggagtttaagaatagtttgggtaatatggtaaaatttcgtttttattaaaaatataaaaaattagttaggtgtgatggtgtacgtttgtggttttagttattcgagaggttgaggtgggaggattgtttgagtttaggaggtagaggttttagtgagttaagattaagtttttgtattttagtttgggtaatagagtgagattttgttttttatttttaaaaaaagaaagaaaataagaaaaatttgggtttgggtatggtggtttacgtttgtaattttagtattttgggatgttgaggtgggtggattatttgaggttaggagtttgagagtagtttggttaatatggtgaaattttttcgtttttattaaaattataaaaattagttaggtgtggtggtggtatacgtttgtaattttagttattcgggaggttgaggtaggggaattatttgaatttgcgaggcgaaggttgtagttagtcgagattgtattattgtattttagtttgggtgatagagtaagattttgttttaaaaaaaaaaaaaaaattcgtttttttgaattgtatttgattggattttttatttatgtataattttgt

SEQ ID NO: 198 - DNA, 6565 bp, Artificial Sequence
  chemically treated genomic DNA (Homo sapiens)
cgatttttaaattttataagggttatcgtagttttttgaagtagaaaatgtagtttattttttgttagtttatgggttatattttgatttaagtatttttacggtgggtatttgcgtttattttgtagttttcgttagagattatgttagaagatggcggtatataggttgagtaagaggtggtgaggttgatcggggtttatcgattatagaataggtttttttagagggatatgaagtatcgttaggttttttgagttttaagttgtggttcgtagtgttttggcgagtagttttgttaatttaattgttgaggtttagggttaagtatagtggggtatttaattttagtttgggttttagttattgtgtgtttagatgcgttaaagttattttcgtagtttattttgtattaattggagttttttataatttaggtgaattttagttttattgaggggaattgatttaaaatattttttacgtcggtttttattgatttgggttaatcgtgtgatcgcggtggttggtacgaatttgacgaattttagggttagtatagtttagttaaattttcgtttattgttaaaggtttattattgttgtttttcgtgggggtgtggttaggttaagcgttttgagttgcgttgttgcgtgtttgatatttgttttttttgatcgtggtgatttagagggtgatttatcggggtagggatgtttgtatgtgtaattttattaagagttaataggttacgattaaatttatttgtttatggggtggtatgagtttgtcgaaatatttttagtgtattgttttgaggaagtaagttatataaatcgtatggggtgtttttggggtttggttggttcggggtatggggttagtagcggtgtatatgttgagtaaggtgggtagggagttgtattgatggggttagtagaatgtgagttgagggaggatgatgtgttagttgaggggtgattgttaaaaatgtatttttttttttgttattatgtgaagaaggatgcgtttgtttttttttttattatgattttaaattttttgtggtttttttagttatgaggaattgtgagttaattaaattttttttttgtataaattgtttagttttgggtagttttttataagaatatgagaatggattaatataggtttaattttggttattttttaattttttaagttattggagttgattttttgggtagttttaatatgattattttttttattttttagttattagggtatattaggttttatgaattattgattttaatttttgggttggaggataggaaaatttttagtagaggttaattggagatattcgtttttttttaggatttttagaattattttaatattttgaaatgttttatttttagatattgggtaatgaatgttaagtataaaatattattgggtattgtggttaattaggaataatagagtagaagattatgatttattttagtttattttaaaatttatattttattgtatttagggttgggtttagaaaggggattattatttaattttagtaagttttaaaaaatagttgttttgattttatgtgaaattataggttattgattatattgtataatttatatttgggtttattgaatgatggtttaagataatttgtaaatttgatattatagtgagttatttaatgtttaatgtaattttttaaggtgatgaaattaattatttaggtagtagaataagttattgttatgtagtataaataattgtttattaattttttataattatttttgtgatattaagtagttttattaatagttttttttatataattttattttattatatattgatttttattatgagatatgatttttttgtggtgaatttatgttaaggtatttatttgagttttttgttgagaattaaattaattttattttttaaaggtcgattttttttaggaatggagaatttaggtttttttatttataattattagattttgttatttataaaattataaagaaagtttaagtatattttgggaatatatatatatttttatgtattatatataatatgtttttgaataatatcgtttttttttaacgttgatgagaaaaataattaatttttggttagggttatcgtttgtgtggagtttgtatgttttttttatgtttgtatggggtttttttaggtattttagtttttttttatattttaaagatatgtatattattttttttaaatgtatgtatagtttatatttattttagtgttttttattagaagtgtttttggtttttatttagaagtttggtgatgtttttgtgattagtaatatgttttaggaatttaatttttgtgtatatttagtagtttatggtaaaattggttttgttttatattgttttatttaaagttatagtttttaagaatttatagatgatattgaggattatttatgtgtatagatatgatggatattttgatatttagtggattttttttaaaaaattgaatttaaaagttttattaaaatttatatttattatttattatttaaatttaattatttttttttttggtattatttaatttatatttaatatttagttttaattatttgtaattgtgtatgatatagtaaagattttggggaggttaagatgggtagattacgaggttaggagatcgagattattttggttaatacggtgaaattttatttttattaaaaatataaaaaattagttaggtgtggtggtaggcgtttgtagttttagttatttaggaggttgaggtagaagaatggtgtgaattcgggaggcggagtttgtagtgagcgtagatcgtattattgtattttagtttgggcgatagagtaagatttttttttaaaaaaaaaaaaaaaaaaagattttgagttaaagtgtttaagttgaatgtattttgttatttataagataaatcgtgttaattttttgtggtttattttatttataaaatagagataataatagtttttgtttttagggttgttgtgggaattaaagatttagaataatgtttagtttttaattagtgttgttataattgtttgatataattgtattatatttgtgtattttgtagattgatattaaattatatttttaaaaataggtgtttaatgttttatttaattattttaaaatatgtttaattatgtttttattttatttttataatatttttataaaaattttttatatatagcgtttatttttggtttagttttttaggaaaataattttgagagttagttatttgaattaaagaaatattaatattattagattatattgggatttttgagattggtttttattaattttttagttacgggtttttgttattatttttattagtgatttaagtgttaaatttaaatgttttgtatttgttttattaaagagatgtagtatttgttttttttttattgtttttattttttttgttatgtttttttttataattataaatatttaggttttttaggttttaaacggggtattttttaatttttatatttttttttttggttatttttttttttttaatagtttaatttatttagatttttacgtttgaaattattttagatgttttagaggcgttttattattataatggtatattattttttatttttttatatgttacgttagtttttaaattgaaaatttgagcgtttatttttggtgtattatttttaaattttagatttttaaaatttagggttatgtaattttaaaaaatttttatttttttttttttattgtttttgtttaggttttattttttttagtagttgttttaaaggtttattttgtttttttttcggagtgttaatttttatcgaagtttttatttagttgttaattttgttttatgtttgataatttgttcgtgcgttgatatatataaaatttttaagataaaaattttttaataatggtaaatgaattttgggaattgtatatagattatatagatttataataagagaaaaggttttagattaatacggaaaattttttatttaattaatatttgtattggtaaattttattaagtaagattttatttaattttatattattttttattgaagaggttgtggttattttttggaaatatttgaatttatttttataagttagagaaatagcgttattcgaaatattattttttgggttcgagttttaaggtatttgataaacggagcgttgtgggtaggggtgaggtgttttttttagggttgggattttgttttgggcgagggcgtcgtagggtaaagattttatcgggtagtagaattcgggtagaaattagtaattgggtttttcgcgtagtagaaaaggggaatttagtcggggtttattttttttgttagcgtagatcgtaagtttggttttattttttcgtcgggagtcggtttggcgcgtttcgtttaggtatttcgatcgtgggtagtttgcgttcgtttgggttttatcgtttcggttcggtagatatttgagcggtggttagggtaggttttcgtttttgtcgatgtttatgttttgggatatagcgacgatgtagtttagcgaattaattatgatagtagcgggaggattttcgagttcgttcgttatagtagaacgcgcggttaagtttggcgcgaaattgtggtcgtttcgttttttcgtttttatttgtgtaggcgaggtttcgttttttcgtttcggcgtacgtagggtcgcggcgtgttcgcgttcgtagacgtttgggaattgcggtcgcgggttcgcgtttttcgtcgggttttgtcgtcgggttgttatttttgttttgttatgtttcgtcggaagtttgcgtcgggcggtttcgttgtttttagtttagtttttgcgaggtaagcggttttgagtcgatttttttagtttacgggaagtttgaaatttatttttttttttataggtgtagtcgattaggtggattttggcgttgtagcggtcgtagcgtttttagcgttcgttttttcgttttagttgtcgtcgtacgtagtaggttttgtttgggattgggtagggttatcggggttgggggggcggggtttgtgggtaaggcgggcggaggcgtggatttttcgttcgatgatagggttggaggaggaaggggcgggttgaagaaggggaaggtgggaagagtttagtcggggttataaattgggtgaagcgttgaggttttagtattttcgtttgaggagataggtaaaggttatgtaggtttttaatggtaggtttgagataggaatttaggttttttgatttttattttgatgagggggtttgtgggtaaggggtgcgttttttaatttttattttttttttttttttttggtggtcgaagagttttattgattttttaaaaaagtgttggattgggtgattagaagaaagttgtttttaggtttttagtttttaagattgtaatagtatggtttaatatttgaaattattacggttaaaagtagttatattgtgtagttttttagtgaatattttttgtagtttagattataaagtttgaaatatagtttgggtggataaagttttttaggatggtatagatgtgattaattatggagttttttttgttgtcgttttttaacgtaataagtacgtttgtttgtttttaaattagagatattgttataggaaaagtttaagggtgattttttatttgggttatttgtatagtattttttagattgaggttgtggaagggtattgaagattggtgtttagttatttatcgtgttttaatgtaggtggtagtttgggtgttttaaaattttgtttttttcgtatatattttttttttaaaatgattattttttttttgttttttttgaggacgagttacgtttttatgaatttattaaaattttgtatttattatttaaagggtagttggtgaaggatttatgtatgtttttggtaagttttttgttaagaaaaaatttataattttgttatatttttagtgatgaatataaattttttaaataggaaatatttaaattgtaatgaatatgttaaaaatgatattgtttttttattatttatttttttttttttgtgtttttgttatataattgtttattttttagaggtattttatttagtatatgtaagtagggtgatttaagttttataattagagaaagttgaaggtttattgaattaagatcggtagtagttttggttttaattaattttaaatacggtttgagttgttgaggtttttgattattagattttattttgttttttatggtgttaaaaatagtttatttatagggttttttagagttaaaagtagaggattttttgaagagtggatggtaaggaattttgttatttagttgtaaagtttaaattggtttatatacgttaggtttttttagagtagagataatatattattttttaattttttcgatatagg

SEQ ID NO: 199 - DNA, 6565 bp, Artificial Sequence
  chemically treated genomic DNA (Homo sapiens)
tttatatcgggaaggttagaaaatgatgtgttatttttattttgagaaggtttgacgtatgtgaattaatttaaattttataattgaatgataaggttttttgttatttattttttaaagaattttttatttttagttttggaaaattttatgggtgaattgtttttaatattataaaagataaggtagagtttgatagttaggagttttagtaatttaagtcgtgtttagaattaattgaaattaaggttgttatcggttttgatttaatgagtttttagttttttttaattataaaatttgaattattttatttatatatgttaaataaaatatttttaagaaataaatagttatgtagtaaaggtatagaggggaaaagataggtaataaaagaatagtattatttttgatatgtttattgtaatttaagtgttttttgtttaaaaggtttatgtttattattaaagatgtgataagattatgaatttttttttggtagaaaatttgttaaaagtatatataagttttttattagttattttttaaatggtgggtgtaaaattttggtgaatttatgaaaacgtagttcgtttttaaaaaaaatagaagaggagtaattattttaagggagaaatatatacgaaaggaataagattttgaagtatttaagttgttatttatattaaaatacggtaggtggttaaatattagtttttaatgtttttttatagttttagtttgaaaaatattgtgtaggtgatttaagtgaggggttatttttgggttttttttgtggtagtatttttggtttaaaaataaataaacgtatttattgcgttgaaggacggtaataggaaggattttatgattagttatatttatattattttaagaaattttatttatttaaattgtattttagattttataatttaaattataaaaagtgtttattggggaattgtataatatgattgtttttaatcgtagtgattttaaatattgagttatgttgttgtagttttaaaaattggagatttaagggtagtttttttttagttatttaatttagtatttttttaaaaaattagtaaaatttttcgattattaaggaaaaaaaaaaaggatggaggttaaaagacgtattttttgtttataagtttttttattagaatgggagttaggagatttgagtttttgttttaggtttgttattaaaaatttgtataatttttgtttatttttttaaacggaagtattaaaattttagcgttttatttaatttgtagtttcggttgggttttttttattttttttttttttagttcgttttttttttttttagttttattatcgggcggagggtttacgttttcgttcgttttatttataagtttcgtttttttagtttcgatggttttgtttagttttagatagaatttattacgtgcggcggtagttggggcgggaaggcgggcgttgggggcgttgcggtcgttgtagcgttagggtttatttggtcggttgtatttgtggaggaggaggtggattttaggtttttcgtagattggaagaatcggtttaaaatcgtttgtttcgtaggggttgagttggaggtagcgaggtcgttcgacgtaggttttcggcgagatatggtagggtaaggatggtagttcggcggtagggttcggcgaggagcgcgaattcgcggtcgtagtttttaggcgtttgcgggcgcgagtacgtcgcgattttgcgtgcgtcggggcgggggggcggggtttcgtttgtataaatagggacgagggggcggggcggttataatttcgcgttaaatttgatcgcgcgttttgttgtaacgagcgggttcggaggttttttcgttgttgttatggttggttcgttaaattgtatcgtcgttgtgttttagaatatgggtatcggtaagaacggggatttgttttggttatcgtttaggtatttgtcgggtcggggcgatgggatttaaacgggcgtaggttgtttacggtcggggtatttgggcgggacgcgttaggtcgattttcggcgagaggatggggttagatttgcggtttgcgttggtaggaagggtgggtttcgattggattttttttttttgttgcgcgggaggtttagttgttgatttttgttcggattttgttgttcggtgaggtttttgttttgcggcgttttcgtttagggtaaagttttagttttggagaaaatattttatttttatttatagcgtttcgtttgttaggtgttttagagttcgagtttaagggataatgtttcgagtaacgttgtttttttaatttgtaggaatgaatttagatatttttagagaatgattataatttttttagtagaaggtaatgtgggattaagtagggttttgtttgatgaagtttattagtgtaaatgttagttaaatggaaagtttttcgtgttaatttgggatttttttttttattatggatttgtatgatttgtatgtagtttttaaggtttatttattattattaaaaaatttttgttttagaaattttatgtatgttaacgtacgagtaaattattaggtatggggtagaattggtaattgggtggaggtttcggtggaggttagtatttcgaaaggaaaatagagtaggtttttggaatagttgttggaagagataaggtttgaataagggtagtggagaagagagggtaaaaattttttaaggttatatgattttggattttggagatttggaatttaaaggtgatgtattagggatgaacgtttagatttttagtttgaaagttggcgtgatatgtaaaggagtggagaataatgtattattgtaatgatgaggcgtttttaggatatttaggataattttaggcgtggggatttaggtgaattgaattgttggagggaagggaataattaaggaaaagaatgtgggggttgagagatgtttcgtttaaaatttaagagatttggatatttatggttgtaagaggaggtatggtagaggaaatggaaatagtaagaaaggagtagatgttgtatttttttaatgggatagatataaggtatttgggtttgatatttaggttattggtagagatgatgataagagttcgtagttaaagaattgataaaagttagttttaaaaattttaatatagtttggtaatgttaatgtttttttggtttagatagttgatttttaaagttatttttttaagaaattgaattaaaagtggacgttatatgtaaaaagtttttatagaagtgttataagagtaggatagagatataattaaatatgttttaaggtaattgagtggaatattaagtatttatttttaaaagtatgatttaatattaatttataaagtatataaatataatataattgtattagatagttgtgatagtattgattagaggttgaatattattttaagtttttaatttttataataattttagaagtaggaattattgttatttttattttatagataaagtaaattataaggggttaatacgatttgttttgtggatgataaaatgtatttaatttgagtattttgatttagaatttttttttttttttttttttaagagggagttttgttttgtcgtttaggttggagtgtagtggtgcgatttacgtttattgtaagtttcgtttttcgggtttatattatttttttgttttagttttttgagtagttgggattatagacgtttgttattatatttggttaattttttgtatttttagtagagatggggttttatcgtgttagttaggatggtttcgattttttgatttcgtgatttgtttattttggtttttttagaatttttattatgttatatataattgtaaatgattaaaattaaatattggatataaattggataatgttaaagggaaaaatagttagatttaggtaatgagtgataagtatgaattttggtaagatttttaagtttagttttttaaaggagatttattaaatgttaggatgtttattatatttatgtatatagatagtttttaatgttatttgtgagtttttggaaattgtgattttaagtgaaataatgtagagtaaaattaattttattataggttattggatgtatataagagttaagtttttagggtatattgttggttataaaaatattattaaatttttaaatgaaggttaaaaatatttttaatagaaaatattgaagtaaatatgagttatatatatatttaagaagaataatgtgtatgtttttgggatgtggaaggaaattggaatatttggagaaattttatgtagatatgggaaaagtatgtagattttatatagacggtggttttggttaggaattgattattttttttattaacgttagaagaaaacgatgttatttaaggatatgttgtatataatatatgaaaatatatgtatatttttaaaatatatttaggttttttttgtgattttataggtaatagaatttggtgattatgggtaagaagatttgggttttttatttttgagaagaatcgatttttaaagggtagaattaatttagtttttagtagagaatttaagtaagtattttaatataaatttattataagaaaattatgttttatagtggagattagtatatgataaaatgaaattgtataaaaggagttattgatgaagttgtttaatattataaaggtgattatagaaaattaataagtagttatttatattatatgataataatttattttattatttgagtaattgattttattattttgaaaagttatattaaatattaaatagtttattgtggtattagatttgtaagttattttgaattattatttagtaggtttaaatataaattatatagtgtaattaataatttgtagttttatataaagttaaaataattattttttgggatttgttaaaattaagtgatgattttttttttggatttaattttaaatgtaataaaatgtgaattttaggatgggttgaaatgggttataattttttattttgttatttttagttaattataatatttaataatattttgtatttaatatttattatttagtgtttgaaggtaaaatattttaaagtattgaaatggttttagagattttggagagaagcgggtatttttagttagtttttgttaagaatttttttgttttttaatttaggggttggagttagtagtttatgaagtttgatatgttttggtgattggagagtgggaggggtaattatattaagattgtttaggaagttaattttaatggtttgggaggttgaggggtggttagaattggatttgtgttaatttatttttatgtttttataaagaattgtttaagattgggtaatttgtataggaaagaggtttaattgatttatagttttttatggttggggaggttataggaaatttaaaattatggtggaaggggaagtaaacgtatttttttttatatggtggtaggaaggaaagtgtatttttaatagttattttttaattaatatattatttttttttaatttatattttattaattttattaatgtaattttttgtttattttatttaatatatatatcgttgttagttttatatttcgaattaattaaattttaaagatattttatacggtttatgtagtttatttttttaaagtaatatattgaaaatgtttcgataggtttatattattttataaataaataggtttggtcgtagtttattagtttttagtaagattatatatgtaagtatttttgtttcggtgagttattttttaaattattacgattaaaaggaataagtattaagtacgtagtaacgtagtttaaaacgtttagtttagttatatttttacgggagatagtagtgataaatttttagtaataaacgaaagtttaattaagttatattaattttagggttcgttaagttcgtgttagttatcgcggttatacgattaatttaagttaatagaaatcggcgtaaagagtgttttagattaattttttttaataaagttaaaatttatttgagttgtaaaaaattttagttgatataaaataaattacgaaagtggttttaacgtatttgaatatataatagttaagatttaaattgggattagatattttattatgtttagttttaaattttaatagttaaattaataaaattgttcgttagaatattacgagttatagtttaaaatttaaaggatttggcggtgttttatatttttttagaggagtttgttttgtaatcgataaatttcgattaattttattattttttgtttagtttatatatcgttattttttagtataatttttgacgaaggttgtaaagtaagcgtaagtatttatcgtaaagatgtttaggttaaggtgtagtttatgagttggtaagaaatgggttatattttttattttagaaaattacgataatttttatgaaatttaagggtcg

SEQ ID NO: 200 - DNA, 2891 bp, Artificial Sequence
  chemically treated genomic DNA (Homo sapiens)
  unsure (223)..(366): unknown base
  misc_feature (223)..(223): n is a, c, g, or t
  misc_feature (366)..(366): n is a, c, g, or t
tttttttttttcgaattgtttttttttttggaggtggtggagggagagaaaagtttatttaaaatgtttttgggtgagggattaaggatgagaagaatgttttttgttttttatgtcgtggaataatataaaataaaaaatttcgagggaatatatattatatattaaatatagattattttagggagtaaataaattatgtgtggggttgggtaattagttnaagtcgaagcgtaaataaaatgtgaatatacgtttgcgggttatatatagtgtatttttattagtatttagaaaaaattgtgagttagtgaattaggaaattaatgtttggaaggtagttaaattttaattagtttaagattnttttttttttttaaaaaaaggtacggaagtaatatttttttttttttttttgattagaatcgatgtattttttgtgtatgatcgtatttttaataataaaaggggaaagaggatttggaaaggaattaaacgttcggtttgttcggggaggaaagagttaacggttttttttataagggtttttgttgattttttcggttcggtttataagttttttatttgttttttttaggaagttcggtttcgcggttcgggtattttttgttttttttatattttttcgtttagtatttttgattttttttaaattcggtagttcgagattgttgtaaatcggcgttatagggcgtaaaggggatttgttttttttgaaatttggttgagaaattgggaatttcgtgtgggaggcgtgggggtgggacggtggggtatagattggtagagagtaggtaatttttttttcgttttagtttagttttggaataggtagatatattttagggttaaatagacgtttttcgtacggggttttacggaagtttgagtaggcggggtaggagggtcggtatttgttgttttggtagtaaattgggggatttagtttgggtggaaggtatttaatttagatagttgtgtatatataatgtataatatatgattttttttaataaatgtaatgggagtttatttataacgcgttttttaagtatacgtggtaatgcgttgttgggttattttaattattttaggtatcgtttttttttttatgtttttattatttttttttatttatattaatattttacgttttgaacgcgcgtttattaatattttttttttttttattttttttgggatttttgattaaagcgcggttttttttttagttttagcgaggcgttttgtagtttggtacgcgcgtggcgtggcggtgggcgcgtagtgcgttttcggtgtggagggtagttgtttcgtttgcgatgatttatatttataggataaggatgcggtttgttaaatagtattgttacggaggagtagtagagaaagggagagggtttgagagggagtaaaagaaaatggtaggcgcgcgtagttaatttatgcggtttttttattttgtttatattttagagttagagtgttcggttgttcggttgagttttttttttattttttttattttttttattttttttataagcgtttttttcgggtttttaaagtagagggcgtgggggaaaagaaaaaagattttttttcgttaattttcgtttatcggttttttataatgcgagggtttggacggttgaggattttcgagttgtgttgttcgcggtcgttatcgtcgggtttcggtcgtttttggttttttttttgtttcgagaagggtagggttttttagaggtttggcgggaaaaagaacggagggagggatcgcgttgagtataaaagtcggttttcggggttttatttaattcgttgtagtaattttagcgagaggtagagggagcgagcgggcggtcggttagggtggaagagtcgggcgagtagagttgcgttgtgggcgttttgggaagggagattcggagcgaatagggggtttcgtttttggtttagttttttcgttgattttttaattagcggttcgtaatttttgtcgtatttacgaaattttgtttatagtagcgggcggatattttgtattggaatttataatattcgagtaaagacgcgattttttcgacgcggggaggttattttgtttatttggggatattttttcgtcgttgttaggattcgtttttttgaaaggttttttttgtagttgtttagacgttggatttttttcgggtggaaaattaggtaagtatcgaagtttatttgttttttaatttatttttttattattttaatgttgagatgagtcgaatgtttaaatagggtgtttttttttttatttttgcgttattgatattttttttagagtagttatggtaattggggttggggtggggggtaatttagaattggatcggggtaaagtgatttgttaagatggtagaggagaaggtagagggaaaacgggaatggtttttaagattattttttcgagatttttgttttatgaatatatttacgttgattttcggtcggtcggatatttttgttttattgtgttaattgttttttgcgttttggggggttgggggttgttttgcggtgggtagaaagttttttgtattttgagttttttggagtagggatcgtatatcgtttgtgtgagttagatcgtttcgtagtcgttgatttgttttcgttttcgggagggtatttaaatttcggtttatcgtatttttgatagtcggagacggatattgcggcgcgtttcgttcgtttgttttcgcggcgattgtaattcgttttgatttttttaagaagttggtatttggttttttaaaaaataataatataatttaaaatttgggtttttagaggtgttaggacgtggtgttgggtaggcg

SEQ ID NO: 201 - DNA, 2891 bp, Artificial Sequence
  chemically treated genomic DNA (Homo sapiens)
  unsure (2526)..(2669): unknown base
  misc_feature (2526)..(2526): n is a, c, g, or t
  misc_feature (2669)..(2669): n is a, c, g, or t
cgtttatttaatattacgttttaatatttttagagatttaggttttaaattgtattattgttttttaaaaagttaaatgttaattttttaaaaggattagggcgggttgtaatcgtcgcggggataggcgggcgggacgcgtcgtagtgttcgttttcggttgttagaaatgcggtgagtcgaaatttaaatgttttttcggagacggggataagttagcggttgcggagcgatttggtttatataggcgatatgcggtttttattttaaggagtttaggatgtaaggggttttttgtttatcgtaaagtaatttttagttttttaaaacgtagagagtaattaatataataaagtaggaatgttcgatcggtcgggagttagcgtgaatatatttataaggtagaaatttcgaaagggtagttttaaaaattattttcgttttttttttgtttttttttttgttattttgataagttattttatttcgatttagttttggattattttttattttagttttaattattataattattttgagaaaagtgttaatagcgtaggaatgggagaaaagatattttatttaggtattcgatttattttagtattaaagtgataaaaaaataaattaaaaggtaagtggatttcggtgtttatttggttttttattcgaaaaaaatttagcgtttaagtagttgtaaggagagttttttagagaagcgggttttggtagcggcggggaagtgtttttaaatgggtagaatagttttttcgcgtcgggagagtcgcgtttttgttcgggtgttgtaagttttagtgtaaagtgttcgttcgttgttatggataaagtttcgtggatgcgataagggttgcggatcgttggttgggggattagcgggagggttgggttagaggcgaagttttttattcgtttcggatttttttttttaggacgtttatagcgtagttttgttcgttcggtttttttattttagtcggtcgttcgttcgttttttttgtttttcgttggaattattatagcgagttagataaagtttcgaaaatcggtttttatatttagcgcgattttttttttcgttttttttttcgttaagtttttgagaagttttgtttttttcgaggtaggaggggagttagggacggtcggggttcggcggtggcggtcgcgagtagtatagttcgggggtttttagtcgtttagattttcgtattataaagggtcggtgggcggagattagcgagagaggattttttttttttttttttacgttttttgttttgggaattcgggaggggcgtttatggggagggtggggagggtggggaaggtggggaggagatttagtcgggtagtcgagtattttagttttaggatgtaaatagagtaagagagtcgtatgaattaattacgcgcgtttattatttttttttgtttttttttaaattttttttttttttttgttgttttttcgtagtagtattgtttgataaatcgtatttttgttttgtgagtataaattatcgtaggcggaatagttgttttttatatcgagaacgtattgcgcgtttatcgttacgttacgcgcgtattaggttgtagggcgtttcgttaaggttggggaaagggtcgcgttttgattaagagttttagggagagtggaggaaagaagggtattaatgggcgcgcgtttagagcgtgggatgttagtgtagatagggaggaatgatagaggtataaggaggaaaacgatgtttagaatgattaaaataatttagtaacgtattgttacgtatatttggagagcgcgttatgaataaatttttattgtatttgttggggggagttatgtattatgtattatgtatgtatagttatttggattggatattttttatttagattgagttttttaatttgttgttaaagtagtagatatcggtttttttgtttcgtttgtttaggttttcgtggggtttcgtgcgggaggcgtttgtttagttttgagatgtgtttgtttgttttagagttgggttagggcgagagggaggttgtttgttttttgttagtttgtattttatcgttttatttttacgttttttatacggagtttttaattttttagttaggttttagaagagataaattttttttgcgttttgtggcgtcggtttgtaatagtttcgggttgtcgggtttgggagaaattaaaggtgttagacgggagaatatgggaggggtagggggtattcgaatcgcgggatcggattttttaaaaggggtaagtggagagtttgtggatcgagtcgggggagttagtagagatttttgtgaaaaaaatcgttaattttttttttttcggataaatcggacgtttaatttttttttaggttttttttttttttttattattggaaatgcggttatgtataaaaaatgtatcgattttgattaaagaagaggagaggagtattattttcgtgtttttttttggggggggggggnagttttgagttaattaaaatttggttgttttttaggtattaattttttagtttattgatttataattttttttgaatattagtgaaagtgtattgtatgtaattcgtaaacgtgtatttatattttatttacgtttcgatttnagttagttgtttagttttatatatgatttgtttgttttttgaaatgatttatatttaatatataatgtatattttttcgggattttttattttgtgttattttacggtatgaaaaataaaaaatattttttttatttttggttttttatttaaaggtattttaagtaaatttttttttttttttattatttttaaaagagaaaataattcgggggaaagggg

SEQ ID NO: 202 - DNA, 1092 bp, Artificial Sequence
  chemically treated genomic DNA (Homo sapiens)
aagttttttttttattatttaagaaggtatttaggtttttttgtgttaggttttaggtaaagtgttggattatttagtaattgggtttagtagtaggatggttttagattgaggttttagggttaaaggattatttttttttttagcgttggttcgggaaaggtaagtttcgggcgggagcgtacgtcgcgttttcgaagtttggttttttcgttacgtttattttttgtttttatttcgcgtttttttaggttttttttcggtgaatcggatgttttgttagttttttattttgcgttttcggtcgcggttcgggtttttcgtaaagtcgttgttatttcggagggtttagttagcgggttttcggaggttggtcgggtaggcgtggtgcgcggtaggagttgggcgcgtacggttatcgcgcgtggaggagatattgttttgtcgcgatgggggttcggggcgtttttttacgtcgtaggtaagcggggcggcggttgcggtatttgtttatcgggagttttttttttttttttttgttgttgttgttttgtatttagttcgggggaggatagaagaaaaaggaggtagaatggatttttttggtttttttttgtggtcgggggcgggttagggtgggtcgcgttgtttaggtagttttgtcgtgttgttaggtagtttggtcgtcggcgtgggcgatgtcggcgttggggcgggagtcgcgagggtgggaggttttggggcgttttcgggacgtggagttagtagggttttgatttgaaaaacgacggtaaagcgtgtttttgattgtttttgagtattttatattttttagatttagggcgtttttatttttagttggaagtttagtttagagtaatggtgttattaaaaggggtgtgttggatgtgaaaatattttttggaagtatttataagtttgtaggaaatatgttttttttatttttttattttgttttttttattatttattttaagaagtaatagaatttgtgtagagtgtgttttaagttatattgtatgtttatttttgtttatgttgaattcggtgtatatttgtgagaataagttt

SEQ ID NO: 203 - DNA, 1092 bp, Artificial Sequence
  chemically treated genomic DNA (Homo sapiens)
aagtttatttttataagtatatatcgagtttaatataaataaaaataaatatatagtgtaatttaaaatatattttgtataggttttgttgttttttgaaatgggtaatgaagggagtagagtaagaaaataaggaaaatatattttttgtaggtttataaatatttttaaagggtatttttatatttaatatattttttttagtggtattattgttttaagttgggtttttagttgggaataaaggcgttttgggtttgaaaggtgtgaggtgtttagaagtagttaagaatacgttttgtcgtcgttttttaagttagaattttgttaattttacgtttcggaaacgttttagggttttttattttcgcggttttcgttttagcgtcggtatcgtttacgtcggcgattaggttgtttagtaatacggtagggttgtttgggtaacgcggtttattttggttcgttttcgattataggggaaggttaaggggatttattttatttttttttttttttgttttttttcgagttggatgtagagtagtagtagtaggagaaggaagggaaagttttcggtgggtaggtatcgtagtcgtcgtttcgtttgtttacggcgtgaaggagcgtttcgggtttttatcgcggtagggtagtgttttttttacgcgcggtagtcgtgcgcgtttagtttttatcgcgtattacgtttgttcggttagttttcgggagttcgttggttgggtttttcgggatggtagcggttttgcgagggattcgggtcgcggtcgaggacgtagagtaggagattgatagagtattcggtttatcgggagaagatttggaaaggcgcgggatgggggtaggaagtgggcgtggcgagggagttaggtttcgggggcgcggcgtgcgttttcgttcggagtttgtttttttcggattagcgttgaggagaggagtggttttttggttttgggattttaatttgaggttattttgttattgaatttaattattgggtagtttagtattttatttggggtttagtatagaaagatttgaatgtttttttggatgatgaaggggaagttt

SEQ ID NO: 204 - DNA, 5203 bp, Artificial Sequence
  chemically treated genomic DNA (Homo sapiens)
agggaatttaacgttttttcggggtagaagggggtagcgcgcgcgaggcggaaggatagttattttcgttgtataaattttttcgcgggtcgcgtcgcgcgtgtaggggttggacgttattcggcgttagagtcgggtttgaggagcggggtttggtcgggaacgagggttgttagtttgggtggtgttatttgttgttttattttttatttttttttttttcgtgaggaattagaggtatcgggtcgcgcgggttgagaatttttaaatttttttcggtcgtattcggttgagttaattcgtagtttttgttagtttttttgtttttcgggtagcggtttttttcgttagttaggtttggaagttattttttgtgagattgggttaggaagtgacgaaaagcgtcgaattgtttttaaattgaaaatatttttttttttttttttggagatagcgttgataaatatatgggatttcggtttttgatttttggttgtcgtttttgtttttttgtcgttaataaaattcgtattgagttttttagtgttttgattaataggtagattaatttttattggggttgggaatagtttgttttaattaatgttattttaaaagttcgttaggatgcgtttagtttcggttttttggatgtttgagcgagttagttatgatatttgttttttttttttttttagttttaaattttttagtaaagtttttagttttcgtttgtttgtttttaggtttataacgggataaatcgtaggatcgggtcgttggtttttagaataggtagcggtttagagaggggatatttagggagaagggattgaggtggttttgatttgtttgttttttttttgaagttgaatttttgttttttgggggtagaggttatagggaaaagagagatggggggatcgttatagggtgatgaaatggaaagtaaatttttttaggaattttatttgtaaaaatcggagagtgtcgttgattttagttgttttatatgttaggagttttaaatttaatttttatttggataatagtatggagggattgggaggtaaagttttgggagtttgattcgttgggttgttaggaatttttttgttgggagattttattggataatgttattttaaaggtattttgggggtgggtagggagaagatagagagagaaagagagagagagagagagagagagagagagagagagagataggttggttttttagagcgaacggaagaggattgaggattgaatttagggagtttttagtattggttatttggtaggaggcgaggaagggcgagggtatcgcggtttttttttaagtcgagtagtggttatagtttgaaggtgttacggggcggttttgggatttttttggtttttttaggttttgggttcggcgaggttgtcgggttagcgggaatcggtaggttgttggagaaaggagagggataaaggtttggaagtgggggaggtattagggattgggcggtcgggatgggagtttttgtttttagggtttattggattcgtttgttagtttcgcggataagggattttatttttttagggtttgtaaaaagagagacgtttggggtattataaagtgacgtaggtgtttgttaagattttttttttttaaaaaatgttagtttttattttttttagcgcgtcggcgttgcgtttttgtttgatcggggaaagagagagtttggaggtgttagaattgttagaatttcggatgggaggtttttggttttgaagttgggagttggaggtatttttttttagaagtgggtatttttttgttttttcgaaggtttgatggggtgggtataggggaatgttagggatcggtgcgggtgagatgtttgttttattttatgttgacgtattaatattggttagaagttttgggtaggttttggcgagttacggttttttagcgggattttttttacgtagatagtttcgttatcgggtgggacgatttcggcggttttcgcgggaacgtattcgtcggtttgagaggttttttttttggttatagggggcggagggtaggggggaataggggtttgtggggaggcggggaaaggagatagaatttaaagcgtaattttcgtcgttttttcgcgttttggagggtagtaagtgggtttcgggcgtgttggtagtcgtaattaaaatggcgatttgcgagttgtttcggttttgtatatatttttggtaatcgcgttcgtattttagtttcggtttttatatttttaggtcgtttcgtttttagagtcggtatttggtagagggagtgaggttttttacgaggtagaatagtatttttattttttttgagattagtttagagagaacgaggaaattttatttttatttttttttttttaaattttgaaaattcggttttattttggggttgaatttttttttttaaatattgatatatgggaagtagttaagttttttttgttttttgtttgtgcggaggagtttttaggagtttttttcggagtttttttttttatttaatgacgttagtggtatttatttttcgttttttgttttttttgattttttgttaaaattttttttcgtagcgagatgggggttggaggggtgggagaaggagttgatttaaagagttagtgttttggggggaaatagtaataagattacggttgttttttttcgaggtaaagtttaagaaggtgttaatttattcggtcgttaattgagaggttgtaaaaatgatattcgtttttagttcggatagaattatttttttttttttcgttttttcgtaagtttttcgtttatgtatagcggatttgagttttgagtttaagtttttttaatgttcgtttggaaagtaaaaggagagagaaagagaaagtcgattttcgttggtttgggatttagggtcgcggttttatttgtcggtatttttcgaaagtcgcgtttttgcgaaatgaaatttcgtttaggaggtcgcggatttggatattcggcgttattttttttatttttgatttaggttttttttcggcgttgcgagttttcggggaagggttagagtcggtagttttttttagttcggggaggggagagggttatgcgattttatttttggttagggtcggggaggtttttgtttttcgggagttttgttcgggttttttggtcgtagggttgttgggttttaggtaggaacgagagggtgaggtttatatgtggttcggcggtttagggcggtttgtagcgtttttattgtttcggttgttaggggttgcggcgacgcggttagttagtagcgagtttaggtcgcgtagattttattgatgagttttgatttttagtattttttttaagttaagaagagtttagcgtatttttcggttgttttattttagtttttttgttttagttttttagttttattttttttcgttttgttttggggtgtgtatagtagtttaggttttttttttttttttcggtttcgtggttcgaagtcgtcgagagagttcgggatagcgtaggattaggtagtcgttcgtttttttgttattttaattgtaggtttcgaggggcgtttttggagtgtattgaggtgtgttttaatcgtgcggtatttaataaatggatttttggtgtgtggttagaagagaaaagttatttatttattttttttttcggttttttggtaatagttgaaggggagttgttttcgtggattgagtagatttaggagagggagtcgtggtgcggagatatacgtattatatatagatgatcggtggtatatacgatatacgttgatatatcgatatcgttagtgggatatatatatatatatatatatatatatatatatatatagagagagagagagaattttttttagtattggttattcgtttttttatttaggtttttattttttttttttttttattttttttggtttttttttttttcgggcgttgcgaaaagtagtcgtatttagttaataaatggtacgtgggagaagttggtgagtgtttggtgaggattttttagggttttttataagaattttttgtatataaagtaagtggcgtgtttattcgggtttttttagttagagttgtgtttttgtttcgttgcgtatcgcggttttcgaaaggagaaaggagagaagaaagggcggggagagcggggtggaggatttggataggttttggaggtttgggttggggaggtttttggtttcgtttagttttcggttcggtaattttttttcggtttaggtttcgtcgcggttttcgtagttggaatggagttgttaggatttagtgacgttttcgttttttttttttttttttaaggggttaggtgggttggggtgcggtcgtcgttgtgttttgtgttttggggtttcggttgggatggggtgggggcgggcgggggcggggcggtaggttacgttgttttggagttggtaagaaaggatagtatagaaatttgtatttttcgaggattgggagtttcgagtttagtttagggggagtgggggcgcgatttttaatttagaaatttttatttgatcgtttaagttcgcggtagtagggcgggtcgcgtcgaatttcggcgtgcgcggagcggggagatgtaggcgagcgttagagttcgggttcgggggttttgcgtcggggagaggagtcgggatttatcggcggagtcgaaaataagtgtatttatatttaaataaacggattaattgtattaggcggggagagggagtatttaatcggttggcgcgaggtttcggcgttgttttgtataaagtaatattttgtgtgagagcgagcggtgtatttgtatgttgcggagtgattagtgggtttgaaaagggaatcgtggttcggttttatttttcgttttggtttaggcgtaggaggaagtgttttgttggaggatgatgatagaggttaggtttcgttaatgggttagtgaggagcggtggaggcgaggtcgggcgtcggtatatatatattaatatatttgagttattattaattagtataggtgtgttggttgtagttattttttttatttatattttttattttttattttttagtcgttgatagtttattttattgttaatttttgttttttttttagg

SEQ ID NO: 205 - DNA, 5203 bp, Artificial Sequence
  chemically treated genomic DNA (Homo sapiens)
tttgggaaggagatagagattgataataaaatgggttgttagcggttggagagtgagagataaagagtgtgggtgagggaagtggttgtagttagtatatttatgttgattggtgatggtttaagtgtgttaatgtgtgtgtgtcggcgttcggtttcgtttttatcgttttttattggtttattagcgaagtttgatttttgttattattttttagtaaaatatttttttttgcgtttgaattagagcgggaaatgaggtcgagttacggttttttttttaaatttattaattatttcgtaatatgtaaatgtatcgttcgtttttatataaaatattgttttatgtaaagtagcgtcggggtttcgcgttagtcgattggatgtttttttttttcgtttggtgtaattggttcgtttgtttgaatatgaatatatttgttttcggtttcgtcggtgggtttcggttttttttttcggcgtagggttttcgagttcgggttttggcgttcgtttgtattttttcgtttcgcgtacgtcgagattcggcgcggttcgttttgttgtcgcgaatttgagcggttaagtgaaggtttttgggttgggggtcgcgtttttattttttttaagttggattcgggatttttagttttcggagggtgtaagtttttgtgttgtttttttttgttaattttaggatagcgtggtttgtcgtttcgttttcgttcgtttttattttattttagtcggggttttaagatatagagtatagcggcggtcgtattttagtttatttggttttttggaagaagaggaaaggggcgggagcgttattgggttttggtagttttattttagttgcggaggtcgcggcgaagtttaggtcgagaggaggttgtcgggtcgagaattaaacgaggttagaggtttttttagtttaagtttttagggtttgtttaaattttttatttcgtttttttcgtttttttttttttttttttttttttcggaagtcgcggtgcgtagcggagtagaggtatagttttggttggagaggttcgagtaaatacgttatttattttgtgtatagagggtttttgtgaaaagttttgaagagtttttattaaatatttattaattttttttacgtgttatttgttgattaagtgcggttgtttttcgtagcgttcgagaggaggggaagttaggggagataagaggggagggggagtggaagtttgggtgggggggcggatgattaatgttgggagggattttttttttttttttgtgtgtgtgtgtgtgtgtgtgtgtgtgtgtgtgtgtgttttattggcgatgtcggtatgttagcgtgtgtcgtgtgtgttatcggttatttgtgtgtggtgcgtgtgttttcgtattacgatttttttttttgggtttgtttagtttacggaggtagtttttttttagttgttgttagaaaatcggggaggaaagtaagtaaatggttttttttttttgattatatattagaagtttatttgttgaatgtcgtacgattaggatatattttagtatattttaaaggcgtttttcggagtttgtagttaaggtgataggagagcgagcggttgtttggttttgcgttgtttcgagttttttcggcggtttcgggttacggagtcgggaaggagaaggaaggtttgggttgttgtatatattttaggatagggcgagggggaatagggttgaagagttgaggtagggaggttgaaatgaagtagtcgaagggtacgttagattttttttgatttagggaaagtgttgaaagttagagtttattaataaaatttgcgcgatttgaattcgttgttgattggtcgcgtcgtcgtagtttttggtagtcgggatagtgaggacgttgtaagtcgttttgggtcgtcgggttatatgtgggttttattttttcgtttttgtttgggatttagtagttttgcgattaaggagttcgggtagggttttcgggaagtaaaggttttttcggttttagttagaggtggggtcgtataattttttttttttttcgggttggggagggttgtcggttttaattttttttcgggagttcgtagcgtcgggaggaaatttgggttagaggtgaaggaggtggcgtcgggtgtttaggttcgcggttttttgggcgaggttttatttcgtaggagcgcgattttcggaggatgtcggtaagtggggtcgcggttttgagttttagattagcgaaagtcggttttttttttttttttttttttattttttaagcgagtattaaagaagtttggatttaagatttaagttcgttgtgtatgagcgagggatttgcgggggggcgggggggggggaagtgattttgttcgaattggaggcgagtattatttttataattttttaattagcgatcgagtggattagtatttttttaagttttgtttcggaaagaagtagtcgtaattttgttgttatttttttttagggtattggttttttgaattagtttttttttttatttttttaatttttatttcgttgcggagaaaagttttaataaaaaattagaaaaggtaaggagcgaggagtgaatgttattgacgttattgggtggggaagggggtttcgggaaagatttttggaaattttttcgtataaataaaaaataaaaaggatttggttgttttttatgtgttaatatttggggaggggagtttaattttagaatgaggtcgagtttttaaagtttaaggagagaggggtgagagtgagattttttcgttttttttggattggttttaaggaaggtgggggtgttgttttatttcgtggggagttttattttttttgttaagtatcggttttgggggcgaagcggtttaggggtgtgggggtcgagattgaggtgcgggcgcggttgttagaggtgtgtataaaatcgagataattcgtaggtcgttattttaattgcggttattaatacgttcgaggtttatttgttgttttttaagacgcgggggggcggcggggattgcgttttaggttttgtttttttttttcgtttttttataggtttttgtttttttttatttttcgttttttgtggttagagggaggattttttaggtcggcgggtgcgttttcgcgggggtcgtcggggtcgttttattcggtagcggggttgtttgcgtggagggagtttcgttgggggatcgtggttcgttagagtttgtttagagtttttagttagtattgatgcgttaatatgaggtgaggtaagtattttattcgtatcgatttttggtatttttttgtgtttattttattaggttttcggggaggtaaagaagtgtttatttttggggggaagtgtttttagtttttagttttagaattaagagttttttattcggagttttgatagttttgatatttttaaatttttttttttttcggttaagtagaggcgtagcgtcggcgcgttggaaagggtgaagattggtattttttggagaaggaaagttttggtagatatttgcgttattttgtagtgttttaaacgtttttttttttgtagattttgggaaggtgggattttttgttcgcggagttggtaaacgggtttagtgagttttaaaggtaaaggtttttatttcggtcgtttagtttttggtgttttttttatttttaggtttttgttttttttttttttttagtaatttgtcggttttcgttaattcggtagtttcgtcgagtttagagtttagaaaagttaagaagattttagagtcgtttcgtggtatttttaggttgtggttattgttcggtttggggggaagtcgcggtgttttcgttttttttcgttttttgttaaatggttagtgttaggggttttttgggtttagtttttagttttttttcgttcgttttgggaggttagtttgtttttttttttttttttttttttttttttttttttttttttttttttttgttttttttttgtttatttttaaaatatttttaaaataatattgtttagtggagttttttagtaaagggatttttagtagtttagcgggttagatttttaaggttttgttttttagtttttttatgttgttgtttagataggagttaggtttaaaatttttgatatgtaggataattgaaattagcggtatttttcgatttttgtaaatagggtttttagaaaagtttgttttttattttattattttgtgacgatttttttattttttttttttttgtaatttttgtttttaagaggtaagagtttagttttaaaggaaaagtaagtaagttaaggttattttagttttttttttttggatattttttttttaaatcgttgtttattttaaaggttaacgattcggttttgcgatttgtttcgttgtagatttgggaataggtaggcgggaattgggggttttattgggggatttgaggttggggagggggagggagtaaatgttatggttggttcgtttaagtatttagggaatcgaagttaagcgtattttgacgggtttttaaaatgatattgattaggataagttgtttttaattttagtaagagttaatttgtttgttaattaaggtattaaggggtttaatgcgagttttattagcgataggagaatagaggcggtagttagggattaaaagtcgggattttatatatttgttagcgttatttttaaaaaaaaaaaaaaaagtatttttaatttgaaaataattcggcgtttttcgttattttttaatttagttttatagagggtgatttttaaatttggttagcggggaaaatcgttgttcgggggatagaggggttgataggaattgcgggttggtttagtcgaatgcggtcggggagaatttaagaatttttagttcgcgcggttcgatgtttttgattttttacgagaggaaagggaatgaaaaatgaagtaataaatgatattatttaggttggtagttttcgttttcggttagatttcgttttttaggttcggttttggcgtcgggtggcgtttagtttttgtacgcgcggcgcggttcgcgggaaagtttgtgtagcgagagtgattgttttttcgtttcgcgcgcgttgtttttttttgtttcggaggggcgttgggtttttt

SEQ ID NO: 206 - DNA, 8085 bp, Artificial Sequence
  chemically treated genomic DNA (Homo sapiens)
  unsure (2545)..(2545): unknown base
  misc_feature (2545)..(2545): n is a, c, g, or t
gttttatgatttaattattttttaatatttttttttattaagattattatattggtgattgggttttgatatatagatttggggagaatataaatatttatattatagtatttattaatttatttagttattttattgttaggtatttatttagaaaaaatgaaaatatatgtttatataaagatttgtataatatttttatagtagttttatttataatattaaaaaaattggaaataatttagatatttatttatagttaaatggataaataaattatagtatataaataaaaagaataaaaagaattaattattgatatatattataatttagttgaattttaaaataattatgttgagtgagagaaattaaatgaaaaaaagatatattatattatatataattttaagaaataaaatttaatttatttggtatttagatttttatttttatattagttttaaataaaaagttttaaatttttttggataaatggttgattttacgattggggtaggaaatatataagatgagtttgatgagtttgtagtattttgtaatattagaaagtaggaaagtttatatatatatatatatatatataatatagagagtgggttaaggagtataagagttaattgaaaaagtttttagtgttaaaaattggaaaaatttgagtaataaagtatttatgaatttatataaagaaaagattgaataaagaagtaaatgggggagaagaagtaaattttttttatagaattttaaataaattatgtagatattttattttaaaggagggttagtataattttttatttttttatatttttttaagtgatttataatgatttttttttaaagagtatagagtatgtaaagagggaaaaaagagtaattatgtaatggagaaatttgataaatattattttagttaggtgatggagaataatattaatagttataagttatgttgataatatgtattttttatatgatgtaataaatatagtatattatttttttgatttttatttcgttaaaatttaaaattttagtttatttatgaggatatattaaattttaatagaagggtattttgtaatatattttattagtatttttaaggattgttaaggttattaaatataaggaaaatttgagaaatttttatagttaagaggagtataagatattataataattaaatgtggtgttttggatggaattttggaaaggaaaaaggatattaagtgaaaatgaagaaaatttaaataaattatgaatattagttaataataatttattagtattagtttattaattgtaataaatgtattttattaatttaaaatgttaatagagaaaattgtataaatgatatatgagtattttttatattatttgtttaatttttttgtaaatttaaaatcgttttttaaaagtaaaatttattaataaaatatttaaagtaaatagatttaaaaggtatatgtaaatgtataatttaatgtttaataaattagatataaatatttttaaaaatttaatatttggtgatagaaagtagattagtggtttgttagaaagtggtgattagtattaggggaaggggatgggatagaatagtatgaagggatttaaaaaatggtatgaggaaatttttggaggtaaagggtatgtttattattttagttttataggtttaataataaattatataatttaaatatatgtagtttattatatgataattatattttgataaagtggtttttttttttaaattatagaaaaaatatttttatatttaaatttttttttttaaaaatagtttttaggaatatttgaagttagttttattatatttgaatttaattagtgaattttgtttatttaaagatttatatatttgggaagtttttgtgttaaaaatgttaattatttagtattaaaatttatggaataatggtgatttaggatatgttggatatttttattgttgtttttttattttaagatttttaattttttggaaataatttttttagatattttgataagggaattattataattaattaaaattaagttaaatatagtttgttagatttaaaatgaggttaagtgttaattttatagtagcgatcggaaaattaaattatatggtatttgatatttaaaattatatttttaagaaggttgttatttgatgttttgggtttgggttatagtatttaattttataatattgggtaattttgtgttttagtttttttaattatgaaattgggataatagtatttattttgtgagattgttgaaggattatagttaatataggtaaaaggtttataagattatttggtaatgttgttttgattttataaattttatatattgtgtggtattagttattaggaaaatataaataaattagtgagatattattttatatatttggggggttataataaaaaagatagataaaaaatgttgttaaagatgtgaagaaattaggatttttatttattgttggtgnaaatgtaagaagtataattatttgaattatagtttggtagttattttaaagattatatttagagttgttatatgaattagtaattttatttttatgtatatatttaggagaaaggaaaatatacgttgtataaaaatttgtatatgaatgtttattagtaggattttttatggtagttaaaaggtgtaaataatttaaatgtttaataattgatagagatggataaataaaatgtggtttatttatataatgaaatattatttgttaataaaaaggagtgaaggagtgaagtattgatttatgtggaatatggatgaattttgatttaaaatagttaaattataggtataaaaagtatattagtggttgttgggagatttaggcggaaatgtggaataattgttagtgggtattgagattttagagttatatttatgttataaaattaatagtgttgatggttgtataattttgagtatatgaaaaattaatgaattgatattttgagtgagttgtatgatattggaattatattttaataaagtatggtaattgttttaagataggttggaaagagaaagtttgaaaataataataatgatattaataaattagtttatttttttagttttatatatttttgtgtttatatttgtttttgttttatttataatggtttttttgtagttgttatattatattttgttatttgatgttcggtgaatattttatatttgttttttagaattttttttattttttttttatttgtttaatttttatatatttaaaattaattagagtaaattatttattagaataattaattttaaattttagtaatttaatatgataaaggtttgttttttatttatatagtttttttttagatgatcgaggggtttaggttttttatttttagtggtttttttattttttggagttttttgtattttttatatatggttgagataaattatgagttattagtatagttagattttgaggttttataagaaaatttgtaaattatttattttgttttgaataaggtatatttaagatgatgttaaaatatttaatggttttgggttaaatatagtttatgattgtgtatttaaaatatatattgtaatatttttttttttttttattgattttatgaatttagcggggatttattttataagtttaaagataattattttttagattaagaatatttagggtaaaaagtattgtttaatatttttattgaggatgttatgatgtagtatattgtataagttggagttaaaggaaattttttttaaagtgttatttattaaaaattggaatatattttttaagataaatcgaagtgtggtatataatatttaaatttttattatagatatagaggtgttattattttttatttttaaatttttttgttacgttgaggatatttaagaggagtaggatatgttggtcgtagtaggagaaatttgaaagtatttatttttatggaatttataagggagagaattttttattttagtatcgtttttgatatatttattattttaaaagataatgtagttaaatgtttttttttgtgttaaatttttataaaattgaaattttaaaatggtgataaaaattttatttttgatagaatttatttatttttttaattagatagggtataatttttaatttgtaaaataaaacgtaatatgtttatgaggttttattttaaagaatttgttattgagagtagtatttagaataacgggtggaaatgttaattttagagttttagattttatcggtaattggggtagggaggggttttgggcggggtttttttagaggaggaggcgttgttagaaagttgtttggttagtttatagttgttattaatcggggtaagttttgttgtatttgtgcgtgtgggtggtatttttaatgagaattagttttatttgttatttgagtgaaatttataattcgaggcggttagtgttttcgtattattgggatttgagattttcggagatgattgtcgttcgtagtacggagttagtagaagttcgattttttttgggaatgggttgtatcgagaggttcgattagttttagggttttagtgagggggtagtggaatttagcgagggattgagagttttatagtatgtacgagtttgatgttagagaaaaagtcgggagataaaggagtcgcgtgttattaaattgtcgtcgtagtcgtagttatttaagtgtcggatttgtgagtattttgcgtttttagttttcggatagaagttggagaatttttttggagaatttttcgagttaggagacgagattttttaataattattatttttttttgcgttttttatttgtcgttcgttgggataaacgatagttatagtttttttgacgataggatggaggttaagggtaggagttgattagcgtcgttttttttcgttttcgatttaggaggtggagattttttcggtttagttatatttaatatttatttttttttttttttgtttttatattttcgaaatttttttttttttttttttttttttttttttggagacgggggaggagaaaaggggagtttagtcgttatgattgagttgaaggtaaagggttttcgggttttttacgtggcgggcggttcgttttttttcgaggtcggatttttattgttgtgtcgtttagtcgtaggttcgttttcggggagttagatttcggatattttgtttgaagtttcggttatatttatttttttggacgggttatttttttttcggttttgttagggataggattttttcgacgaaaagacgtaggattagtagtcgttgtcggacgtggagggcgtatattttagagttgaagttataaggggtgttggaggtagtagttttagttttttagaaaaggatagcggattgttggatagtgttttggatattttgttggcgtttttaggtttcgggtagagttaatttagttttttcgtttgcgaggttattagtttttggtgtttgtttggtttcgaatttttcgaagatttatcggttgttttcgttatttagcgggtgttgttttcgtttatgagtcggttcgggtgtaaggttggagatagtttcgggacggtagttgtttataaagtgttgtttcggggtttgttattagttcggtagttgttgttttcggtttttgagagtttttattggttcggggttttagtgaagtcgttttcgtaggtcgttgcggtggaggttgaggaggaggatggttttgagttcgaggagtttgcgggttcgtttttgaagggtaaatttcgggttttgggtggcgcggcggttggaggaggagtcgcggttgtttcgtcggggcggtagtaggaggcgtcgttttggtttttaaggaagattttcgttttttagcgtttagggtcgttttggtggagtaggacgcgtcgatcgttcgggacgttttcgttggttattacggtgatggattttatttacgtgtttattttgttttttaattacgttttattggtagttcgtattcggtagttgttggaagacgaaagttacgacggcggggtcggggttgttagcgtttttgtttcgtcgcggagtttattttgtgtttcgtttatttcggtcgttgtaggcgattttttcgattgcgcgtattcgttcgacgtcgagtttaaggacgacgcgtattttttttatagcgatttttagtcgttcgttttaaagataaaggaggaggaggaaggcgcggaggttttcgcgcgtttttcgcgtttttattttgtggtcggtgttaatttcgtagttttttcggatttttcgttggggttatcgttttcgttgtcgtcgcgagcgattttatttagattcggggaagcggcggtgacggtcgtattcgttagtgttttagtttcgtttgcgtttttttcggggtcgattttggagtgtattttgtataaagcggagggcgcgtcgttttagtagggttcgttcgcgtcgtcgttttgtaaggcgtcgggcgcgagcggttgtttgttttcgcgggacggtttgttttttattttcgtttttgtcgtcgtcgtcggggcggttttcgcgttttattttgtattcggttttaacgggttttcgtagttcggttattaggtcgtcgtgtttaaggagggtttgtcgtaggtttattcgttttattttaattatttgaggtgagggttcgggacggggtacgtttagcgcgttcgggagtagcggtttcgttggcggcggcggtcgttaatttttagttttagttttagcgtatcgttgcgtttttcggggcggtcggagagggtgggtagcgggatatagtataggggtagttgtttttttttttttttttttttttttttatttttggggatacgaaggtgggcgtagaatatattatttttggggcgtgtttttttgaaagttgtttttttgtttgttttttaatttttcgaattttttagatttcgaagtagaattaatttcgatttaaaacgtgtagcgttatattaggttcgttgtagtttagtggggtagaaagtgcgcggcgagttgggggttttatgaaatgttttttttttagaagaaggacgtttattaggagtgtttgttttggagaggagttaaggtatcgttttttcgggaggggtgggatttgagaggtggtcggttagaatcgaaagtagtattattttagggatttgaatattttagtggtttagtttttttaagaattttaagattaaaattaagtttacgtgggaaatgtttaaattgtggatttaaacgtttgttattgtattgtatcgtttttttattattgtttgttatttattataattttttttatatataggtttaaaaaatattattttgtatattgaagtaatggaatgtaaaaaaagaatgttttgtttggaattttatgttgtgaataggtaaaatagtgttagtgtattggataatattttaaaatgataaatatatatttgtttaagtaagtaatgattatagggttgtgttttaaaaatttaaaattaaaatattgtaaagtattatcgaatttttaaagttaaattatatttgttttgatttagtatatagataggaaggatataatattttatttgttaaagattaaattgtttttatataaagagttttgtagaaagatttttttttaatcgattttaattttttaggatataatattatatattaattattgtttttttatattggtgttattgatgaatggttaattatttgtaagtatggtgaatttagttacggatagtttattattaagtttagtttgtatgttttttaagtgtatatatatagttttgtttttaaaatttttttttattttgttaatattggtttaagaaatttttagtattagatagtggtgtatttaaaaataaatggagtattttgttttgtattttaagg

SEQ ID NO: 207 - DNA, 8085 bp, Artificial Sequence
  chemically treated genomic DNA (Homo sapiens)
  unsure (5541)..(5541): unknown base
  misc_feature (5541)..(5541): n is a, c, g, or t
ttttgaaatgtaaaataaagtattttatttatttttaagtgtattattatttaatattaaaggttttttaaattagtattaatagggtgaaaggagattttaaaaatagaattgtatatatatatttgaaagatatgtaaattaaatttggtaatagattattcgtaattggatttattatatttgtaaatgattagttatttattagtagtattaatataaaagaataataattagtgtataatattatgttttagaaagttaaagtcggttaaaaggaaatttttttataaaattttttatatagaaataatttagtttttgataaatgaaatgttatgttttttttgtttgtatgttgggttaaaataaatatggtttggttttaaaagttcgatggtattttgtaatgttttggttttgagtttttaaaatataattttgtaattattgtttatttaagtaagtatatgtttgttattttaaagtattgtttaatatattgatattgttttgtttatttataatataagattttaaatagagtattttttttttatattttattattttagtatgtaaagtagtgttttttaaatttgtatataaaaaaaattgtagtgaatagtaagtaataataagaaaacggtgtaatgtagtgataggcgtttaaatttatagtttaaatattttttacgtgaatttaattttaattttgagatttttaagaaaattgagttattgaagtgtttaaatttttaagatggtgttgttttcggttttggtcggttattttttaagttttatttttttcgggggaacggtgttttaatttttttttaagataagtatttttggtaaacgttttttttttaagaaagaagtattttataaagtttttaattcgtcgcgtattttttgttttattgggttatagcggatttagtgtgacgttgtacgttttaaatcggggttggttttgtttcggaatttggaagattcggaaagttaaaaaataaataaaaaaatagtttttagggaggtacgttttaaaaatagtatattttgcgtttattttcgtgtttttaagagtgaggagaggagggaagaagaagggaggtaattgtttttgtgttgtgtttcgttgtttatttttttcggtcgtttcggggagcgtagcggtgcgttggggttggggttgagggttggcggtcgtcgtcgttaacggaatcgttattttcggacgcgttgggcgtgtttcgtttcgggtttttattttaggtagttgagatagggcgggtagatttgcggtaggttttttttgagtacggcggtttggtagtcgagttgcgggagttcgttgaggtcgagtgtagggtagagcgcgggggtcgtttcggcggcggcggtagaggcggaggtggagggtaggtcgtttcgcgggagtaggtagtcgttcgcgttcggcgttttgtagggcggcggcgcgaacgggttttgttggggcggcgcgtttttcgttttgtataggatgtattttagggtcgatttcgaggaggacgtagacgagattgaggtattggcgggtgcggtcgttatcgtcgttttttcgggtttggatggggtcgttcgcggcggtagcgggggcggtggttttaacgggaaattcgggaaggttgcggggttggtatcggttataaggtaggaacgcggggagcgcgcggaggttttcgcgttttttttttttttttttatttttagagcgggcggttggaagtcgttatagagagggtacgcgtcgtttttgggttcggcgtcgggcgggtacgcgtagtcggggaagtcgtttatagcgatcggggtggacgaggtatagggtgaatttcgcggcggggtaaaggcgttggtagtttcggtttcgtcgtcgtaattttcgttttttagtagttgtcgagtgcgggttgttaataaggcgtgattgagaggtaggataggtacgtggatgaaatttattatcgtggtggttagcggggacgtttcggacgatcggcgcgttttgttttattagggcgattttgggcgttgagaagcgggaattttttttggggattagggcgacgttttttgttgtcgtttcggcgggatagtcgcggttttttttttagtcgtcgcgttatttagagttcgaggtttgttttttagaagcggattcgtagatttttcggatttagagttatttttttttttaatttttatcgtagcggtttgcggagacggttttattggggtttcggattagtgagggtttttagaggtcgggagtagtagttgtcgggttggtgataggtttcggggtagtattttatgggtagttgtcgtttcggagttgtttttaattttgtattcggatcggtttatgagcggggataatattcgttgggtggcgggggtagtcggtggattttcgggaagttcggggttaaataggtattaagagttggtgatttcgtaggcgggagggttgggttggttttgttcgggatttgagggcgttaatagagtgtttaagatattgtttagtagttcgttgtttttttttgggggattagaattgttgtttttagtattttttgtagttttagttttggaatatgcgttttttacgttcgatagcgattgttggttttgcgttttttcgtcggaggggttttgtttttggtagggtcgagggaagagtagttcgtttagggagataggtatggtcgaaattttaggtaaggtgttcgaggtttggtttttcgggaacggatttgcggttgggcgatatagtagtggggattcgatttcgggggagggcgggtcgttcgttacgtggggagttcggggattttttgtttttagtttagttatgacgattggatttttttttttttttttttcgtttttagggaggagggaaaagggaaggaggagggggtttcgggaatataggggtagagggaggagaaagtgggtgttgaatgtggttggatcggagggatttttattttttgggtcgggggcgggggagggcggcgttggttagtttttgtttttggtttttattttgtcgttaggggaattgtggttgtcgtttgttttagcgagcggtaagtggggagcgtaagaaaaagtagtaattgttaggagatttcgttttttaattcggggagttttttaagagagttttttaatttttgttcgaggattggagacgtagagtatttataagttcggtatttgagtggttgcggttgcgacggtaatttagtgatacgcggtttttttatttttcgattttttttttggtattaaattcgtgtatgttgtgaagtttttagtttttcgttgagttttattgtttttttattaaaattttggggttagtcggatttttcggtatagtttatttttaggaagggtcggatttttgttggtttcgtattgcgggcgatagttattttcgaagattttagattttagtagtgcgggagtattagtcgtttcgggttgtagattttatttaaatgataagtgaagttagtttttattgagaatgttatttatacgtataaatataataaggtttatttcgattagtgatagttgtggattggttagatagttttttaataacgtttttttttttagggaggtttcgtttaaagtttttttttattttaattatcggtaggatttgaaattttggagttggtatttttattcgttattttgaatgttatttttaatagtaggttttttgggatggaattttataagtatattacgttttgttttgtaaattaagaattatgttttatttaattggaaaaatgaatagattttattagaagtagaatttttgttattattttaagattttagttttgtaaagatttaatatagaggaagatatttggttatattattttttaaaataataaatgtattaaggacgatattaaaataagaaatttttttttttatgagttttataaaagtgaatgtttttaagttttttttgttgcgattaatatgttttgttttttttgagtatttttagcgtgataaagaaatttgggagtgggagatggtaatatttttgtatttatgatggaagtttggatgttgtgtgttatatttcgatttgttttaaggaatgtgttttaatttttagtaaatagtattttaaggaaagttttttttagttttagtttatatagtgtgttatattataatatttttagtagagatgttgaatagtattttttattttaaatatttttagtttgaaaagtaattatttttgagtttataaaatggattttcgttaaatttatgaagttagtagaaaaagggaagaatattgtaatatatattttagatatatagttataaattgtatttgatttaagattattgggtattttaatattattttaaatatattttgtttaaaatagagtgaatgatttgtaaatttttttgtaggattttaaggtttagttgtgttaatgatttatagtttattttaattatgtataaagaatgtagaagattttagaaggtgggggagttattagaggtaaggagtttggatttttcgattatttggggaggggttatatgagtgagaaataaatttttattatgttaggttattaggatttggagttggttgttttagtaaatagtttattttgattaattttagatatgtggaagttaggtagatagaggaaaggtaaagagaattttgggaagtaggtatagaatgtttatcgggtattaaatggtaggatataatatggtaattgtaaggggattattatgaatagaataggagtaagtgtgggtatagaagtatatgagattagagaagtaaattaatttattaatattattattgttgtttttaggttttttttttttagtttattttaaaatagttattatgttttattgaggtgtaattttagtattatatagtttatttaaagtattagtttattgattttttatgtatttagagttgtgtaattattagtattattaattttgtaatatgagtatgattttaaaattttaatatttattagtagttattttatattttcgtttaaattttttagtagttattaatatgttttttgtatttgtgatttggttattttggattaaggtttatttatgttttatatgaattagtattttatttttttatttttttttattgataaataatattttattgtatggataaattatattttatttatttatttttattagttgttggatatttgggttgtttatattttttggttattatgaaaaattttgttaatgaatatttatgtataagtttttgtgtagcgtatattttttttttttttggatatatgtataggagtggaattgttggtttatatggtaattttaggtgtggtttttggagtaattgttagattatggtttaaatgattgtattttttatatttntattagtagtgaataagggttttagtttttttatatttttgataatattttttatttgttttttttgttatagttttttaagtgtgtgaagtggtattttattgatttatttatatttttttgatggttaatgttatatagtgtatagaatttgtaaaattaggatagtattgttaggtagttttgtaagttttttatttgtgttaattgtaattttttaatagttttataaaataggtattgttattttaattttatagttgggaaaattgaggtataaggttatttagtattataaagttaagtattgtaatttaaatttaagatattaaatgatagtttttttaggagtgtgattttaaatgttagatgttatataatttgatttttcggtcgttgttgtaaaattggtatttggttttattttaaatttgataaattatatttggtttgattttggttggttataataatttttttgttagaatgtttggggaggttgtttttaaaagattgaaaattttgaagtgggaaaataataataaagatgtttagtatgttttaaattattattattttataaattttgatgttgggtgattagtatttttggtataggaattttttaaatgtatgaatttttgaatgaataaaatttattgattaaatttaggtgtgatggggttaattttaaatatttttgaagattgtttttggagaagaggatttaaatgtggaagtattttttttatagtttggggaaaaaaattattttattaagatatagttgttatataataagttgtatatatttaaattgtataatttgttgttagatttgtgaaattaaaatgataaatatattttttgtttttaaaagtttttttatgttattttttaaatttttttatattgttttgttttattttttttttttagtattaattattattttttggtaagttattaatttgttttttgttattaaatattaggtttttaaaaatatttatatttgatttattaaatattaaattatatatttgtatatgttttttaggtttgtttgttttagatgttttattaatagattttatttttgggaaacgattttggatttatagaaaaattgagtagataatatagagaatgtttatatattatttgtataattttttttgttagtattttaaattaatagggtatatttgttataattaatgaattaatattgataaattgttattaattaatatttatagtttatttagattttttttatttttatttaatgtttttttttttttttaggattttatttaggatattatatttaattgttatgatgttttgtgttttttttggttgtgagagttttttagattttttttgtatttgatgattttgatagtttttaggagtattggtgaggtatattgtaagatgtttttttattgggatttgatgtatttttatgagtagattagggttttgggttttggcggggtggaaattaaagaggtaatgtattgtatttattatattatatgaagggtatatattgttaatatgatttatgattgttaatgttgttttttattatttggttgaagtagtgtttgttaggtttttttattgtatagttatttttttttttttttttgtatattttgtattttttggaaggaaattattatgagttatttaaggaagtgtgggggagtagggagttatgttagtttttttttggagtggagtatttatataatttatttggaattttgtgaggaagatttgtttttttttttttatttatttttttatttagttttttttttgtatggatttatgaatattttgttgtttaaatttttttagtttttggtattgggggtttttttagttgatttttgtgttttttgatttattttttgtattgtgtgtatgtgtgtgtatgtgtggatttttttattttttggtattataagatgttatagatttattagatttattttgtatattttttgttttagtcgtagaattagttatttatttaaggaagtttgagattttttatttgaaattggtatagaaatgaagatttgggtgttaaataaattaggttttattttttagaattgtatataatatagtgtattttttttttatttggttttttttatttagtataattattttgagatttagttaaattatagtatgtattaatagttaattttttttattttttttatttatatattatagtttgtttatttatttaattgtggataaatatttgagttgtttttaatttttttggtattataaatagagttattatgaaaatgttgtataagtttttgtatgaatatgtgtttttattttttttgggtaaatatttagtagtgaaatggttggataaattagtaggtgttgtgatatgagtgtttgtgttttttttaaatttgtgtgttaaaatttaattattaatgtgatagttttagtaggaggaggtgttggggagtgattaggttatggagt

SEQ ID NO: 208 - DNA, 7110 bp, Artificial Sequence
  chemically treated genomic DNA (Homo sapiens)
tgttttttgtgatgttttagaggttagaaggatgttttgaaggggaaaattgtaggagttaggtagagtagggttttggtttttttttaatgtttttttatttagataaattcgggttattttgtagaggttgtagtgagttatgattacgttattgtattttagtttgaggaatagagggagatttcgttttaaaaaaaaaaaaaaaaaaaaaaaaaaaaaaaaaaaaaatttcggtttattttatgaagtatttggtaggtgttttaatattttttggtatatgggaattatttttttttattattggaaggtttaaaaagtaaataatgtgttttatatggttagagttagtattaaggggattaagtagaataattggtagttagtgttagtttggagattaatatagttaaagttgttttgttatgttatgttttttttatttgtattgttttacggtttaagataaaatttttgaacgttatttggatatagtgagtatttggtttgttttattgtttttaggagtaattaatttaatttttatttttttgagaatgatgattttatatagtatatttttttattaagatgtgaaagatgatattatggtatttgaaatagttttaggagagatttgggatatgggaagtttgtagataataatggaaaatttttttttagaatatagttatttgtatgatttatagtagcgttttttggagaatgttttaaaattatttttattgaaagaataataatgtttgttattaggataaatgaaataaggggaaaattttagatttttggaataatgggtttatatttaatttaatgattattatgtttttatattttgtattatttagaaaatagtagttaaatagatagaaatatagaagattgtttaaaaattaaagttattgagttagatttttttttgaaaggttagcgtatgggagatgagaaaggtattatagagattagagtgtttatataaaagatattttagtagatgatttataaagagtatattaagtatttatattatttatattaagttgttggttatttcgtttattaaagaaaataagaaagaaattttttttcgatattattttggtgtagtaataatagagttttggaattagttgttagaagcgataattaaagttagtttattatgtttattaattaatttatatagttattttgaagttttatataattgtttttttgttataagtttttatttttttttatggtattttggttttgaatttagataggtaaagaattaagtatggtcgggcgcggtggtttacgtttgtaattttagtattttgggaggtcgtggcgggtagattacgaggttaggagatcgagattattttgattaatatggtgaaattttgtttttattaaattataaaaaattagttcggtatgatggtgtgcgtttgtagttttagttattcgggaggttgaggtaggggaattgtttgaatttgggaggtagaggttgtagtgaatcgagattatgttattgtattttagtttgtgagatttcgttttaaaaaaaaaaaaaaaaaaagaaaaaaaaaaaaagaattgaagtgtttggagattagtgtattgtaatatttatatagttaagtaggtatttttaattgaattttaaaaaagtattatttttgaaattttttttagtttagatagggttagttatttgggtagaaaggaaaagaaaaataaaaaattggaaaaggatgtattagtattttttttagaaataatttaatattaggaatagaaggaggattttatttattaatttttaataattatttgatgttgttgttgggttggttaaatatttgttaatattgatgatttttttatttattattagagagaagtagagggatttgatgtttagagaagtagtaaaatttattttttattttttttttttagtcggatggaagtatttggaggttggttttatattttagtattttagtgttggtgatgtagattatttttgttttagagtaattttgtgttatggaatttaagaggattttgtcgtattaggataggaatgtatttttgttttatttgtttttatgaaagtagattttagagatttttagatgttatgagattaattgttatttagggtaggttttaggggagggatagagaagggtagtgttaataatagggattttggagataagattagtaatttaagaaataaatgtgagatattttatttttttttaatttattttttttttaaaagtttatttttattttttttttttttattacgtagtaattgataattaaatatagttttggtttttattatgtaatttagtagaatatttagatattaggaattttttatttttggttatttatataataatgaaatttgtagtttacgttaggttgtgtggatagtatttgtatttttggaaattaattggaggttttttttttattttttttcggttgttttttatttttttttttattgtggtttttgttttttttaagttgattagaattatgtataaaattagtttttaataaatattaatattgaagttttagtaggttgttaatttttgtatagttattttaaatgttgtatataagtgtaaagttttatggagttttagaggtttttaagaatattgtaaatattttaggtttaattagtagtttcggagttaggtaatggtttgtggttttttgcgttaggttttttgaggtttttagtttttagaggttgtttgtaattatgatgtgtatatatatagtatttttttttaaatatagtataaattttttttagattttgttaggtatttataattattgaatatatatgtagattgatttttatttttttaaagtttgaaaaataatttagtgttttaatttaggtttcgttagatattttttgatttaaattgtcgtttgtagttttattttttaagggaaatgaaaaaataataaatttttagattggtgttgatgtttattttttttaagcgggtcgattatttgttttgtagatttttgacgggtggggtgcggggtaggagtgcgatttaatttttagtattttcgaattagtttttttacggtgataggttagtttaatcggggttgtaaatagatttgataggtttgttttgggttgacggttattgattaggtttttagattagataagttatttggttgagtttatagtaggtggggcgcgtttattagtttaggggtagtgattggacgtttgttgtaatatcggagaatgtacgttttgggttgtagtaggagatatttttaagtatagaattaaaagggtttattttaagcggtagggtattagcgatggagaggttcgagagttttagcgtttagtttttttttttacgtttgggaaggcgtagaataggtcgatgtagagtaaggagtgagttttaggttttagttttttggtttgtttttagggtagtaggcgaggagtggtattagtttggggatttttttttcgcgttttgtaagaatcggcggtagttagtaggcggggaggcgggggtacgtgtttggatgtgggtgtttgtgtaattagttttttaagcgttagtttcgatagcgttttttcgggaggttggttcgagtttttgttttcgtcgcggcgtaggaagggttggggtttcgttgtttgtattaggtaagagtatttcgagtaaaggaagaagacgatttgttttcggagttattattggggagtgggaatttggaaagttttttaattagggatatacgtgatttttttcggaaagtagtttcgattgtggttcgtgtatttttttatttttttttgaatttttttaggttttttcgtttcgtttattcgttgggttgtagttttttatcgtttcgtattttttatttaattcggtaattttaaacgtgtacggttcggtcggggcgcgcggagtttggtttcgggcgatttattttgtcgggtttttacggcggttaagggggggcggggttaggtggtttttgagaatcgagtttgatttcgacgtcgcgaatcgatttggagttcgaggggaaagatgttcgatttttttgggggtatcggagcgggcgtaggagaggtttgcggggtgcgttttatttatagggatttttttttagtttatttagataggtgttttttgggtttttgaaatttaacggttatgtgtttacgtttagtacgttcggttgagagtttttatttttagggtaaacgagtcgagttatcggggaagcgagaggtggggcgttgtaagggagtcggatgaggtgatatacgttggcgatataatagtaggttgttttttgtgttaagattgatattatgaggatatagatttgggggaagggggaatttttaggtaaaggttgttatagttaaatttttgcgaacgattgtgattcgatagcggtgtaaaaggaaagagcgaatgtagtttacgtcgcggaaatttaggggtagaggtaaggggggagggtattttttttgtagggatcgtttttgtatttttttttatattgagtagcgtggttatttggttttttttatttgtgtataggtaattttagattcgagttagtgatattgtttaacgtatttattttagtttttattattagttttttattttcgttttataatagtttattttgttttcggttgggtttttgggtagaggtcgaggtttagttcgttattttcgtttcgcgttgttgtaaaagtcgtagtaagtgtagttgtaggttggcggttgggaatcggttcgagtaagttttaggtagttatattgggtatgtttagtagagtttgcggtttggggattttgcgttcgtatttagagttatcgttttgtttttttttatcgttttttgttttgttttgtttttttttcgttcggcgcggtttcgttcgtttttcgttcgtttttcgttttttttcggtttttcgaggcgttcgggttttcggcgcggcggcggagggggcgggtaggtcggcgggcggtgatgtggcgggattttttatgcgttgcggtaggatacgcgttcggcgttgggacgcgattgcgtttagtttttttttttcggaagttgtagttatgatggaagtttgagagttgagtcgttgtgaggcgaggtcgggtttaggcgagggagatgagagacggcggcggtcgcggttcggagttttttttagcgtttgtgagtagtcgcgggggtagcgttttcggggagtcggtcggtttgcggcggcggtagcggcggcgtttttcgtttttttttcgttttttttaatcgtgtagtttttttttcggttttttttgaaagggaaggtggaagtcgtgggttcgggcgggagtcggttgaggcgcggcggcggcggcggtatttttcgtttttggagcgggggggagaagcggcggcggcggcggtcgcggcggttgtagttttagggagggggtttgagtcgtttgttattatttttagggttgggaacgtcggagagttggtttttttttttttattgtttttaatacggcggcggcggcggcggtatatttagggattcgggtcggttttaaatttttcgttcgtcgtcgtcgtatttttcgtggttcgggtttcggaggtcgtcggcggaggtagtcgttcggaggattattcgttttttttttatttcgttgtcgtcgttgttaggtttttggttgttgaggagaagtaggtttagtcgttgtaattatttagtagtcgtcgtagtagttattattcggttgcggtttagagttaagcggcggtagagcgaggggtattagttatcgttaagtttagagttatttttattttgtagaagaagtttcgttattagtagtttttgttatttttttttttttttttttttagttataggtttttagatatgatagttattattaaagagatcgttagtagaaataaaaggagatattaagaggatggattcgatttagatttgatttgtatttatttttgcggttgtttttttttatttttttgttatttttttagaacgtgggagtagacggatgcgaaaatgttcgtagtttgggtgattataatatttaattttggttaggttgttaggttatatattttgtgttttttttttgtgtatttaatttagggtgtgtttggttagacggaatttttgtttggttgtaagtgttaagttatcgattgtttttttaggttatttatatggtttttttttgagggttattgttcgttaatatagaatatagtatattgttagtggattagcgagttcggtaattcggttttttaaatgaataaaaaagtagacgttttttgaggttgagtatatttcgattaaattttggtttaggttttagattaagggtttagattagaataaaatgaaaattagtgttgtacgtacgtatattgtattagaattttgtagtgattgttttagttttttgagttgtattgatagatttttttaaaatatgattgatttgtataattttagaagtagaattatttttagtatatatggtgtatattgagggtaaaaagtagttttgttaatgtttaaatttaagttatttataattttgaattgtatgtagaagttttgtagtttgaagttaatagtgttataatatattttataaggcgtttttattagatttttgttatatttatttttttttttttttatggggtgatgtaggatagtgtttgaaatttgtattttagtagtatttaatgtttagtgtttttgttataaatatagaatggatattgagtagtttttgattttagatggtaatgtgtaggtttaagggtattgtgtgtagtaagtgaagattgtagaaataaaattttagtttatgtttgaaatttaagtattgttgtgatgttagaattgttgtttatcgtttttaggttttaggttttttgatattttttggtatcgttaattttattgatttg

SEQ ID NO: 209 - DNA, 7110 bp, Artificial Sequence
  chemically treated genomic DNA (Homo sapiens)
taaattagtaaaattaacgatattaaaaggtgttagaggatttgaaatttaaaaacggtgagtagtaattttggtattataataatatttaaattttaagtatgaattgaagttttatttttgtaatttttatttgttatatataatatttttgaatttatatattattatttgggattagaaattatttaatatttattttatgtttatgataagagtattgaatattaaatgttattgaagtgtaaattttaagtattattttatattattttatagggagagaaaaaggtaaatataataaagatttagtaagaacgttttataaggtatattatggtattattgattttaaattataaaatttttatatatagtttaaagttgtaggtaatttaagtttaaatattaataaaattattttttgtttttaatgtgtattatatatattgaaaatgattttgtttttaaagttatgtaaattagttatattttaaaagaatttattaatgtaatttaggaaattaaaataattattgtaagattttgatgtaatatgcgtacgtgtaatattaatttttattttattttgatttaaatttttgatttagggtttaagttaagatttaatcgaaatatgtttaattttaaaaagcgtttatttttttgtttatttaggagatcggattatcgagttcgttaatttattaatagtgtattgtattttgtattaacggataatagtttttaggaagagattatatagatagtttaagaaagtaatcggtggtttgatatttgtaattaggtaagagtttcgtttagttaaatatattttaggttgaatatatagaaaggaaatataaaatatatgatttagtaatttgattagggttaaatgttatagttatttaaattacggatattttcgtattcgtttatttttacgttttaagagagtgatagaaaggtaaagaggagtagtcgtagaaatggatataggttaagtttaagtcgaatttatttttttgatatttttttttgtttttgttaacgatttttttgatgatggttgttatgtttgggagtttgtggttgaagaaaaaggaggagagagatggtagaagttgttggtggcggggttttttttgtaggatggaaatggttttggatttggcggtagttgatgtttttcgttttgtcgtcgtttggttttggatcgtagtcgggtaatggttgttgcggcggttgttggatggttgtagcgattgggtttgtttttttttagtagttagaggtttggtagcggcggtagcggaatggggagaagacgaataatttttcgaacggttgttttcgtcggcggttttcggagttcgggttacggggggtgcggcggcggcggacgggaggtttaaaatcggttcgggtttttggatgtgtcgtcgtcgtcgtcgtcgtgttggaggtagtagaaggggagagattaatttttcggcgtttttagttttggaaatggtgataggcgatttagattttttttttggagttgtagtcgtcgcggtcgtcgtcgtcgtcgtttttttttttcgttttaggagcgggaggtgtcgtcgtcgtcgtcgcgttttagtcggttttcgttcgagtttacggtttttatttttttttttaggagaagtcgaggaagaggttgtacggttagaaaagacgaagaggaggcgagaaacgtcgtcgttgtcgtcgtcgtaggtcggtcggtttttcgagggcgttgttttcgcggttgtttataggcgttgagaggggtttcgggtcgcggtcgtcgtcgttttttatttttttcgtttgagttcggtttcgttttatagcggtttaatttttaaatttttattatggttgtagttttcgagaggagagaattgagcgtagtcgcgttttagcgtcgagcgcgtattttgtcgtagcgtataaagagtttcgttatattatcgttcgtcggtttgttcgtttttttcgtcgtcgcgtcgggagttcgggcgtttcggaagatcgaggggaggcgggaggcgagcgagaggcggacgggatcgcgtcgggcgaggggagggtagggtagggtagggggcggtaggagggggtagagcggtagttttgggtgcgagcgtagagtttttaagtcgtaggttttattgagtatgtttagtgtagttgtttggggtttgttcgggtcggtttttagtcgttagtttgtagttgtatttgttgcggtttttgtagtaacgcgaggcgaggataacgagttaagtttcggtttttgtttagaaatttagtcggaggtagggtaggttgttgtggggcgggggtggaggattgatgatgaaagttgagatgggtgcgttgagtagtgttattgattcgagtttgaggttatttgtgtataggtgaaaaggattaggtgattacgttgtttagtgtagagggaaatgtagggacggtttttgtaaggggaatattttttttttttgtttttatttttagattttcgcggcgtggattgtattcgttttttttttttgtatcgttgtcggattataatcgttcgtagagatttgattgtaatagtttttgtttagagattttttttttttttaaatttgtgtttttatggtgttagttttagtataaagagtaatttgttattgtgtcgttagcgtgtattattttattcggtttttttgtagcgttttatttttcgttttttcggtaattcggttcgtttgttttaaaaatgaaagtttttagtcgagcgtgttgaacgtgaatatatagtcgttgaattttaagggtttaaagggtatttatttaaatgaattgaaagaggatttttgtgagtgggacgtatttcgtaggttttttttgcgttcgtttcggtgtttttaagagagtcgagtattttttttttcgggttttaggtcggttcgcggcgtcggagttaagttcggtttttagagattatttagtttcgtttttttttggtcgtcgtgaaaattcggtaggatggatcgttcggggttaggtttcgcgcgtttcggtcggatcgtgtacgtttggggttatcgggttgagtggaaagtacggaacggtaggaagttgtagtttagcgagtgggcggggcgaggagatttaggagggtttaaaaggaggtggaaggatatacgggttatagtcggaattatttttcgaaggaggttacgtgtgtttttagttggggaattttttaaatttttattttttagtgatagtttcggaggtaagtcgttttttttttttgttcggggtgtttttgtttggtgtaggtagcggaattttaattttttttgcgtcgcggcggaaataggggttcggattagtttttcgaaggagcgttgtcggggttggcgtttggggaattggttatataagtatttatatttaaatacgtgttttcgttttttcgtttgttggttgtcgtcgatttttatagaacgcggggagagagtttttaaattggtgttatttttcgtttgttattttaagagtaagttaaaggattgagatttgagatttattttttgttttatatcgatttattttgcgtttttttaaacgtgggaaaaggagttgggcgttagggttttcgggtttttttatcgttgatgttttgtcgtttagggtgaatttttttggttttgtgtttgagggtattttttgttgtagtttagagcgtgtatttttcgatgttgtaataaacgtttagttattatttttgagttggtgagcgcgttttatttattgtggatttagttaagtgatttatttggtttgagaatttagttaatggtcgttagtttagaataaatttgttaagtttgtttatagtttcgattgggttgatttgttatcgtgagagagttgattcggaaatgttgagagttggatcgtatttttatttcgtattttattcgttaaggatttataaagtaagtagtcgattcgtttaaagagaatgagtattaatattagtttgggaatttattgtttttttattttttttaggaagtagaattatagacgataatttgagttaaaaaatatttaacgagatttaggttgaagtattgagttgttttttaaattttgagagaatgagaattaatttgtatgtgtgtttaataattgtaagtgtttagtaaagtttaaagagggtttatgttgtatttgagaaagagtattgtatatgtgtatattatagttgtaggtaatttttgaagattagaaattttaagagatttagcgtagaaagttataggttattatttaatttcgggattattaattaaatttgggatatttatagtgtttttagagatttttgaggttttataaaattttgtatttatatatagtatttaagatagttgtgtaggagttaataatttgttgaagttttagtgttgatatttattgaagattggttttgtgtatagttttggttagtttgggaaaggtaaggattatagtggaaaaggaaatggaaagtaatcggaaaagagtaagagaaaggtttttagttgatttttagagatgtagatattgtttatatagtttagcgtgaattatagattttattattgtataaataattaaagataaggagtttttgatgtttaggtgttttattagattgtatggtaaaaattagagttgtgtttaattattaattattgcgtggtagaaaaagggaaaatgaagatgaatttttaaaaggggagtagattagggaggggtaaaatgttttatatttgttttttagattgttgattttgtttttagagtttttgttattagtattgtttttttttgttttttttttggagtttattttaagtgataattagttttatagtatttgagaatttttgaaatttgtttttatggaagtaaatgaaataagggtgtatttttgttttggtgcgatagaatttttttggattttatggtatagagttattttggagtagagataatttgtattattagtattaaagtgttagaatatgagattagtttttaagtatttttattcggttgaagaaagaaaatgggaaatgggttttattgtttttttaaatattaggtttttttatttttttttagtggtgaatgaaaggattattaatgttggtagatatttggttagtttaatagtaatattaggtggttattaggagttggtgaataaaattttttttttgtttttagtgttaagttgtttttgaaagaaatattgatgtatttttttttaattttttgtttttttttttttttttatttaaatggttggttttatttaaattaaagaaagttttaaaaatagtatttttttaaagtttagttgaaaatatttgtttggttgtatagatattataatatattggtttttaagtattttagttttttttttttttttttttttttttttttttttttgagacggagttttataggttggagtgtagtggtatgatttcggtttattgtaatttttgttttttaggtttaagtaatttttttgttttagtttttcgagtagttgggattataggcgtatattattatgtcgggttaattttttgtagtttagtaaagatagggttttattatgttggttaggatggtttcgattttttgatttcgtgatttgttcgttacggttttttaaagtgttgggattataggcgtgagttatcgcgttcggttatatttagttttttatttgtttggatttagaattagaatattatagggagaagtagaagtttgtaataaagggataattatataaagttttagggtgattatgtagattgattagtaagtatggtaaattagttttaattatcgtttttaatagttgattttaaaattttattgttattatattaaaataatgtcgaaagaaaattttttttttattttttttgataagcgaaatgattagtaatttgatgtggatgatataaatatttgatgtgttttttgtaggttatttgttaagatgttttttgtgtaaatattttgatttttatagtgttttttttattttttatacgttgattttttaaaaagggatttaatttaatagttttaatttttaaataattttttgtatttttgtttgtttaattattgttttttaaataatatagaatataaaaatataataattattggattgaatgtaaatttattgttttaagggtttgaggttttttttttattttatttattttaataataaatattattgtttttttaataaagataattttaagatattttttaaaaggcgttattgtgggttatataagtaattatattttaaaagagaattttttattattgtttataagttttttatgttttaaattttttttgaagttattttagatgttatggtgttattttttatattttggtagagagatgtgttgtatgaaattattatttttagagaaataagggttgagttggttgtttttgagaataatagagtagattaggtatttattgtgtttaagtggcgtttagaaattttgttttggatcgtggagtaatataaataaaaaagatataatatgataagatagttttgattatgttagtttttaggttaatattagttattaattattttatttggtttttttaatattaattttagttatatggagtatattgtttgttttttagattttttaataatagaaaaaggtaatttttatatattagaaaatattgggatatttattaggtgttttatagagtaggtcgaaattttttttttttttttttttttttttttttttttttttgagacggagtttttttttgttttttaggttggagtgtagtgacgtgattatggtttattgtaatttttgtagaatagttcgaatttgtttaggtagagggatattgagaaggagttaaaattttgttttgtttaatttttataatttttttttttaaaatatttttttggtttttaaggtattataaaaaata

SEQ ID NO: 210 - DNA, 6478 bp, Artificial Sequence
  chemically treated genomic DNA (Homo sapiens)
tttattttgaagggatgtttaagaaatattgttaaatttaaaagtgttgtagagtaatatgtattataagattatattggtataatagtaataaatagtatttttttatataattttaaaaaaatatatagatttatgttaagtattagttaagatgtttggtatatggtaggtatttaatatttaatgaatatatgtagaggatttttattttttattttatattttttggataagattttgaatttttatgagtatgtattatttaaatttagatttatagggagtgatggaaaatgtgaaaataaaattttaaaaaggaaaagaaagagtaaagatttagatttaaaaaaggaaatgtaaataagatgaaatagttaaagataggtttttttaaaattaatgttgagataatgttattagtagtgatagttagttaagagatggttcgtagtttattgtttagtattgaggtatttagtaggggttgtatttaatttttaagttggaattaatcgaaattgttgggtttgaagagttgtttttatgagttatcgacggtagaaagtatagaagtattaaagaaaataatttagaaatgtggaaagagaaaagtatgtttttgttttgggagaataatatttgtgtgtaattaagtaggaagattttgtggaggaaagtttgaaaaagtagagagttgaagagaaaagagttaaatgaaggatacggtggttaatatttaaagtaaaaagatatttttgaagaagatgtgtttttagggtttttaagaagtcgttatatttatgtttagagttattttgtaagtttatttggaaagtgtattggtgttttttggtataagatttacgaatattaatagttttgttatgtgagtaggtgtttatattgaagggttataagtaaagtttttatgtgttattattgttagaatttttttcgtttttttttaatataaaagtagttttgtttgttagtatggaagttttgggaagagttttatatttgtttcgtgttgttaatatttttgttttggtttttttgttggaatatataagttatttagtattagttatttatttttttggtagaattgtggtaagaggggattaatagggaaaaaaaattaaaaaataaataaaaagttaaaataatatgaaagagttgggtatgtttttaaaataattagtgtttattttttttagttttgtgtttgtgtttgtttgtattttgtatgtttgtttttgtggtggggggggatatgtttgcgtttttgaaaatttttttatttagatattataaggtattagtttaattttgaatatagtcggttgtagtacggtgtatagatacgattgttttttttttagaaaattttttagtttaaatatgtttgtagagtatgatttatggtgtttttttttggattgtttagtgggtaattgttgtacgaaaattagagaaatagatgtagattttgaattttggttataaatttttgttttatgattatgggttttaaatgtgttgtgttatattgataaatatatagttattttgaaataaaatggattttatttttaaagttttgttttttgttttttattttttgtttgtttgttggttggaaatatatttattagattattgattaaatataaagaaaatagagatgatatatattagaatgttattttatgttataataagaagatatttgggaaagttttttttaattttgtggttaatgtttaaaatgggtgttagtagtttatattttattacggataaatcggtttattttttattttttattttatttattaatttttatagtgtacggatttgtatttaaagaattatggtttatttatgtattttttttttattttatttaaaatgaagaatttggagatagaattaagtttttaagaagtgtaagtatttattgatgaagaaataattagtatgtggttaaattatgggtttgttttataaattaatatttggattaagtaatagttttaattattgttattagtataattaatttatgatgaggaatgattaattgattagcgaatattgttatattataagaaatttatattattttttttatggggatttaaatattgattatttattttaaggtttaagtttattttttagttgagaattttaaggtaattatatattttatatttttttgtataaagaaagaaaatatcgagtcgtttaatttttattatatatagagagagatatattaatgttgttatttttgtgtaatgatatagtatagaggtaagaaattcggaagtagtggtttcgtttaatgaggttgattttatagtttaagaaatgagaatgaatagaattttgaggatatttatttttatttttatttttttgggattagtgtatttttattttttggagagatgttaagtaagaatgtgtagtagttttttttggataatagatttttgtatatatatatttgttagtgatgttatgttttttatttttaatttaagttttttttgttttatttttaatatagttgttttttttttttttgtttaataattttttatttatttttattgttcggtaaaaatgaatttagtttttaaggaattttaaggattttaaataagtatttggagttataagttttatggattaagtagaaattggtatataatgtagtgttttgtgtatttttataattattttaatgatagtgtgttaaatgttttgtaaatttttttgtgtttttttgtttaaaatgtgtgttttttttgtagttaaagggttttttataataagtttttgttataaaatgatggttatataaaagagagaagagaggcgtaaaaataataaatatagatttagtaaaaattttatttttttattgttttgaattttttaatagtaagaattgagtttgttgggttgaaaattgttttaatgtatttttataaaaggatttttgatttggtaagtgtgtgcgatgtatattttttatgttatattataagtgttatttagtaattttattagatagggtagtgttttagtatggggtggggtgttttttgataggtttttaaaaggttcggatgttaatgtatattttaatattatttataaaaaggagattggagtagtgtttttttttgtattgggtaaggagattttttttttttgtttaattatttgtttgttttgttttgtgggagaattataagtaaatgttatagaggtagtggagaaaaaagggtgttttaatttttttttagagttttttttatttgatgtatgttgtattttttaaataagttgtgtaaaatggttgtagggtagattggtttttttttttaaagttttttattcggttgggtttatttgtaaatattgtatttattttttttagtgttttaggattggttggaaagatttttttttttgtaggttgggttagtgtgagagatttaaaaaattatttttttttaaaattattgtattttaataaaaggattgggtaggggttggaatgagagaaaattggttttttaaaatgtaaaattgttatatttaaattagtttataaaatatgcgtttaattatgtggtgggatgtgtgtaggtgtatgatgagagaggtaattaatatggttatttggggtgtaaggatgtgggaataggtaagtaatttttatattggatttttattttagggagttgggttttagttatagttttgagttgtgtgattttgggtaggttttattttttcggggttttgttttattagttgaatagtatgaggatgagttatagttaatatttgttttatgatatttatttagtattatataagtgttatttttgtttttttagttaatattgacgtgggtagtattatatgtttattttatagatgaggaaattgaagtttgaagaagttaaatatttattttagaatatatagttggtaagtggtagatttggaattggaatttagtttagtttgattttttaatttatgtttttgattattatattgtttttttaagtttagatttgaaattttattttttgtgtggttgtgtgtttgggataggggtaattaatttttgattattttatatgttgtatagaatttggagaggattttttaaagtaaatgaatttcgaaagttggattgtagagtaaacgagtgtagttaatttagttaggggtttgtaagagggagaaagagaaaaagattgtggaatggaaagttttttaatttaagttttttttaaggggtagttattttttgttttatagtttagggtttgtatgtgttttttttggagtggaaaaatatataagttataaggaatttaatagatagaaaggcgtatagaggaatttaaagtgtgggttggggggcgaggcggtgggcgggaggcgagcgggcgtaggcggaatatcgttttttaagttaagtcgtcgtaaataaaaaggcgtaaagggagagaagttggtgtttaacgtgagttaggagtagcgtttcggttttttttttgtttattttaaaagtattttttgtattgtttttaaggtgagaaataggaaagaaaacgtcggtttgtgcgttcgttgtttgtttttttggttgtttgtttttgtagggttgttgggagtttttaagttttgtgagaattttgggagttggtgatgttagattagttgggttatttgaaggttagtagttcgggtagggtttatcgaaagtttattcgtatatattaggtaatttaattttttattttgtgtgatagaagtagtaggaagtgagttgtttagaggtaggagggtttattttttgttaaaggggggattagaatttttttatgcgagttgtttgaggattgggatgtcgagaacgcgagcgattcgagtagggtttgtttgggtatcgtcggggtaggattcggaacgtattcggaaggttttttgtaagtatttatttggaaggagaatttgggatttttttgggaatttttcgtttcggttggattggtcgagtaagtttggaaaatggtaaatgattatttggattaattataggtttttagttggtttgtttgttataatttatgattcggggttgggaaaaagattaatagtttacgtgttaaaaaaggggtagagtttgatggagttgggtggatttttttatgttatttgtttttatatttagaggataagtatttttgtagatatttagtgtaagggagattatgtttgattgtatggatgttttgttagtgagttttgggtaaattttggatttttatattgcgagttcgtttttttgtatgttttaggagaaagtttttaaagtatgttttagtggattgatttaaatcgaatggtagtatcggtatattgtttaatgtaggtttatttttttttttttttttattaagaaaaaaaaaattgttttttttgtatgtaataaagacgttggaaataaattgtattggtagtaagataaaggatttaatgatttaatgttgaaggggtgtgatatgttggtatgtatattgattttttttgttgaaaattttttgttagatgttttttttttaaataatttttttcgtttttatgtttttttttttattaattttatagttttttgaaaatagtttttaaaatatgtataaaaatgtggggggtggggagtagagggtgattataagattttaaaatattttttaagtagggtaatttgatatattttgtagtttttattaaaatgtatgtagagtggaatttaattttgttgttttttggattagttattagttgtataggtttttttattttttgtgtattttaatagtttaaagtaattaaaatatgatattttttttgaaaggaatttagtttaattaaggtggttgttgttttcgaagtttataaattattagtttaagttgtcgtttttaatgttttttttgttaaggaaaggtaatattttttagtattgattttgttgttatttttttaagttattttgttggtttaagaagttgttgttttgttagaaaattattggtaatgaatattttttggattgagttatttattatttttatattttgtagtttagttcggaacgtggatattagttaaaggaaaggaaatataagtggggtagtttaatttaaaaaaaaaatattgattattttgttatttgatgttgatatagtgtcgaggtacgtatttggttaatagtagtttggttgtaggtttgagaaatgattaggagttttagaaaattttattttcgggtggttgtagtgggagtttgtaggatgtttcgtcgttttgatagtgatttagataaatggtttagttatttattaaaatgtttttagtattttatttg

SEQ ID NO: 211 - DNA, 6478 bp, Artificial Sequence
  chemically treated genomic DNA (Homo sapiens)
taaataaagtattaaaaatattttgatagatagttgagttatttatttaaattattgttagggcggcgaagtattttgtaggtttttattatagttattcgaaggtgggattttttgggatttttgattattttttaagtttgtagttaggttattgttgattaggtgcgtatttcggtattgtgttagtattagataataaaatagttaatattttttttttaaattgggttattttatttatatttttttttttttaattgatgtttacgtttcgggttgaattgtaagatatggaaataatggatggtttagtttaaggggtgtttattgttagtagttttttagtaaaatagtaattttttagattaataaagtgatttggaaaggtggtagtagggttaatgttaagaaatattgtttttttttagtaaggaaaatattggaagcggtagtttgaattggtggtttatgaatttcgggagtagtagttattttaattaaattaaattttttttaaggaaaatgttatattttaattattttggattgttggaatatataaggggtggggggatttatataattagtagttaatttaaagaatagtaaagttaaattttattttgtatatattttagtaaaaattgtaaaatgtgttaaattgttttatttgaagaatgttttaaagttttgtggttattttttattttttattttttatatttttatgtatattttaaaaattgtttttaagagattataaggttggtaaggagaggagtatgggggcgggaggggttatttgggaagaaaatatttaataggaaatttttagtaaagggaattaatatgtatgttagtatattatatttttttagtattaaattattaaattttttgttttgttattaatgtagtttatttttaacgtttttattgtatgtaagagagataatttttttttttttggtagaagaagggaaaaaaataaatttatattgagtagtgtgtcgatgttgttattcggtttgggttaatttattgaagtatgttttgagagtttttttttggagtatgtaggaagacggattcgtagtgtagaaatttaggatttgtttaggatttattgatagaatatttatatagttaaatatgattttttttgtattgaatgtttgtaaaagtgtttattttttaggtgtggaggtaaatggtatagaaaagtttatttaattttattaaattttgttttttttttggtacgtaggttgttggttttttttttagtttcgaattatgaattatgatagataagttagttaaaagtttgtaattgatttaaatgattatttattattttttaggtttgttcggttaatttagtcggggcggggggtttttagaaagattttaagttttttttttaagtaaatgtttgtaaaaagtttttcgaatgcgtttcggattttatttcgacggtgtttagataaattttgttcggatcgttcgcgttttcggtattttagtttttaaatagttcgtatgggggaattttggttttttttttggtaaagaatagatttttttgtttttgaatagtttattttttattatttttgttatatagaatgaaagattgaattgtttaatatatgcgagtgaattttcggtgaattttattcgggttgttaatttttaaatgatttaattagtttgatattattaatttttaggatttttatagagtttaaaaatttttagtagttttgtaaaagtagatagttagagaggtaggtagcgagcgtataagtcggcgtttttttttttattttttattttaaaaataatataagaagtgtttttaaaatgagtaggggaggagtcgggacgttgtttttggtttacgttgagtattaatttttttttttttacgtttttttatttgcggcggtttagtttggaaaacggtgtttcgtttgcgttcgttcgtttttcgtttatcgtttcgttttttagtttatattttaaatttttttgtgcgtttttttgtttgttaaattttttataatttatgtatttttttattttagaaaaagtatatgtaagttttaaattgtagaatagagaatggttattttttgggaaaggtttgggttgggaaattttttattttatagttttttttttttttttttttttgtaagtttttggttgaattgattgtattcgtttgttttgtaatttagttttcgagatttatttattttgaaaaattttttttaggttttatgtagtatatagagtagttaggaattggttatttttgttttaaatatatagttatatagaaaatgagattttagatttggatttgaaaaaatagtatagtggttaagagtatgggttggggaattaaattgaattagattttaattttaggtttgttatttattagttgtgtgttttgggataagtatttaatttttttaggttttagtttttttatttgtaaaatgggtatataatattatttacgttagtgttaattgggaggatagaaataatatttgtatggtgttgggtaaatattatggaataaatgttagttgtgatttatttttatattgtttaattggtgaaataaaatttcggggagatgagatttatttaaggttatatagtttagagttgtgattagaatttagttttttaggatgaaagtttaatgtgaaaattatttgtttgtttttatatttttgtattttaaatagttatgttggttgttttttttattatatatttatatatattttattatataattaaacgtatattttgtaaattggtttaagtatgatagttttatattttgaaggattagtttttttttattttagtttttgtttaatttttttattaaaatatagtaattttaagggaaaatgattttttagattttttatattgatttaatttataggaagaagagtttttttagttagttttaaaatattaagaaggatagatgtagtatttataaataaatttagtcggatggagagttttaaaagggagagttaatttattttgtagttattttgtataatttgtttaaaggatgtaatatatattaaataaaggaaattttggagaggaattaaaatatttttttttttttattgtttttgtagtatttatttgtaatttttttataaaatagggtaggtaagtggttaggtagggagggagagtttttttgtttaatgtagggaagagtattgttttagttttttttttgtggatagtgttggaatgtgtattggtattcgggttttttaaaagtttgttagggggtattttattttatgttgaaatattgttttgtttagtggagttgttaagtggtatttgtggtgtaatatgaaaagtatgtatcgtatatatttattaagttaaagatttttttatgaaggtatattaaaataatttttagtttagtaagtttagtttttgttattgaaaagtttagggtaataaaggggtgagatttttgttgaatttgtgtttgttatttttgcgtttttttttttttttttatatggttattattttgtaatagagatttattgtaagaaattttttaattataaagaaaatatatattttaagtaagagaatatagaggaatttataaaatatttaatatattgttattaaggtagttgtaaagatatataaagtattatattatgtgttaatttttatttggtttatgaggtttatggttttaaatgtttatttaaggtttttagagttttttggaaattgagtttatttttatcggatagtggaggtggatgaaaagttgttagataagagaagaggaaatagttatattggaagtagagtaggagaaatttaagttagagatgagaaatatggtattattgataggtatgtgtgtatagggatttgttatttaggggaggttgttgtatatttttgtttaatatttttttaaagagtagagatgtattggttttagggaagtgaagatggggatgggtgtttttaaaattttgtttatttttattttttaagttatggaattagttttattgagcgagattattgttttcgaattttttatttttatattgtattattgtataaaaataataatattagtgtgtttttttttgtgtgtggtaaaggttgggcgattcgatgttttttttttttgtgtaagaaaatgtaaaatatataattattttgaagtttttaattgagaaatgaatttgggttttgaaatgaataattagtatttaaatttttatgaaaggaatagtatgggttttttataatatgataatattcgttagttaattaattattttttattatgaattaattatgttgatagtaataattagagttattatttaatttaagtattaatttataaaatagatttatgatttagttatatgttaattatttttttattagtaaatgtttatattttttgaaaatttgattttgtttttaaattttttattttaagtaaaatgaaggaaagatatataaataagttataattttttaaatatagattcgtgtattataaagattaatgagtagggtagaaagtgaaaaatagatcgatttgttcgtaatgaaatgtaaattattgatatttattttaaatattagttatagggttggaagaaatttttttaaatatttttttgttatggtataaaataatattttgatatgtgttatttttattttttttgtgtttgattaatgatttaataaatgtatttttaattaataagtaaataaaaagtgaaaaataaaaagtaaaattttgagagtaaaatttattttgttttagagtaattgtatatttgttagtgtgatatagtatatttgaaatttataattataaaataaaaatttatagttagggtttagggtttatatttgtttttttggttttcgtatagtaattatttattggataatttagaaagaaatattatgaattatgttttgtaaatatgtttgaattggagagttttttgaagaaagagtagtcgtgtttgtgtatcgtattgtagtcggttgtgtttaaaattgggttaatattttgtgatgtttaaataagaagatttttagaggcgtagatatatttttttttattataggggtagatatgtaaagtgtaggtagatataggtatagggttgggggaggtggatattgattgttttaaagatatgtttagtttttttatgttgttttggttttttgtttgttttttaattttttttttttgttaatttttttttgttatagttttgttagaagaataaatggttagtattgagtgatttgtgtgttttagtagggaagttaaggtagagatgttggtagtacgaggtaagtatgaggttttttttagggtttttatattagtaggtagagttgtttttgtgttggaagggagcgggggaagttttaatagtaataatatatggaaattttgtttgtggttttttagtatgaatatttgtttatataataggattgttgatgttcgtggattttatattaaaagatattaatgtattttttaaatgaatttgtaaggtggttttgggtatgagtatagcgattttttagaaattttagaaatatattttttttaaaaatgtttttttattttgagtgttggttatcgtgttttttatttggtttttttttttttagttttttgtttttttagatttttttttataaagtttttttatttggttatatataaatattgtttttttaagataagggtatatttttttttttttatatttttgaattattttttttagtgtttttgtgttttttgtcgtcgatgatttataaagatagttttttaagtttaatagtttcggttggttttaatttgaaagttaaatataatttttgttgaatgttttagtattgagtagtgagttgcgaattattttttagttgattgttattgttggtggtattgttttaatattagttttggggagatttatttttggttattttattttgtttatatttttttttttaaatttagatttttattttttttttttttttttaaaattttatttttatattttttattattttttataaatttagatttaagtaatatatgtttataaaaatttaaagttttgtttaaaagatataaagtgaaaagtaaaagttttttatatgtatttattaaatgttgaatatttattatgtgttaggtattttaattggtgtttggtatagatttgtatatttttttgggattgtgtgggggggtgttgtttgttgttattatattagtatggttttatgatatatattgttttgtaatatttttaaatttagtaatattttttgaatatttttttaaaataaa

SEQ ID NO: 212 - DNA, 2534 bp, Artificial Sequence
  chemically treated genomic DNA (Homo sapiens)
aggtaggaaagtgggatagtcggggagttggattttattttttgtgagtttcgttggtatttgatggtatgtggtttggagagggtaggtgatttggcgtggagggttagagggtaaatttttaaataagtggtaataggttattaatttgaaagggaaaattgtgtagtgatgggaaatgtgtttaataaatttattgggtgattaattataaaggttgggttggagttttagaggttgtttgttaaatattttattaagcggtattttgaaagttgttatttgcgtattttgggagtttagaggggattttgagggggaatgaggtttggaggatggaattatttttaggtagattgagaaggagtttggattttatttttaaatatagtttggagtttataggttagaggttttaatgggagaaaagttaaaggaagagggtgtagaaaggagttttagggaattggtggttatgtgattttgagtaaattttatttttttttgagatttagtgtttttatttttatggttttgtgtgtgttatagagatatggtggggattaaattcgatcgtgatatgaaagtgtttgggaaattttatggttttatttaaatatgagttatttttatttgaattaaggggggaagttatttggtaggattaggaattttatttttttgaatttttatgggttttgtcgaggttgaagtagttaggggttaaagttagtttttagtttttggaagggtattgtgaaagtggatttgatttgagaagtcgttttttgatgtgggtagttatgtgatgttagtttcgaataagagggggtagtttggagtttggaaaggtgttagtgtaggtggggtttacgtttagattttttttgttgattgttttgatgatttatttttatattttagtttttttatttttattgtagagtcggaaagggtgtggggaagagaggagagggaggtaggttttgggttttggtttcgttttttgtttttttttatttttttttgggtttggttatttagttaaaaggtaggttaagagtaggagagatatagagttcggtattggttttaggtagtagttagttcgtcgttcgtttgtgtgtttttagagttatggagagagttagtttgatttagaaggttaagttggtagagtaggtcgaacgttatgaggatatggtagtttttatgaaaggcgtcgtggagaagggcgaggagtttttttgcgaagagcgaaatttgtttttagtagtttataagaacgtggtgggcggttagagggttgtttggagggtgttgtttagtattgagtagaaaagtaacgaggagggttcggaggagaaggggttcgaggtgcgtgagtatcgggagaaggtggagattgagttttagggcgtgtgcgatatcgtgttgggtttgttggatagttattttattaaggaggtcggggacgtcgagagtcgggttttttatttgaagatgaagggtgattattatcgttatttggtcgaggtggttatcggtgacgataagaagcgtattattgatttagttcggttagtttattaggaggttatggatattagtaagaaggagatgtcgtttattaattttattcgtttgggtttggttttgaattttttcgttttttattacgagatcgttaatagtttcgaggaggttatttttttggttaagattattttcgacgaggttatggttgatttgtatatttttagcgaggatttttataaagatagtatttttattatgtagttgttgcgagataatttgatattgtggacggtcgataacgtcggggaagaggggggcgaggttttttaggagttttagagttgagtgttgttcgttatcgtttcgttttgttttttttagttttttattttgtcgagaggattagtatggggtgggaggttttattttttttttttaggcgttgtttttgttttaaagggtttcgtggagagggattggtagagttgaggttatttggggttggggattttattttttttgtagttgttgagcgtatttaattattggttatgtttttatttttgtttttcgtattcgttttttttcgattttaggattaggttattttttttttttttttgttttttttttgtttttgttgtttttgatcgtaggaattgaggagtgtttcgttttgtggttgagaattggatagtggtaggggttggagatgggtgtgtgtgtgtgtgtgtgtgtgtgtgtgtgcgcgcgcgttagtgtaagatcgagattgagggaaagtatgtttgttgggtgtgattatgtttttttttaataaagtttttttgtgatattttttttgttttttttttagtttttggcgatgggttgggagtgggattggaatttgatttagagattttgattttggatttttgagttagggttttgaattttttaggtggtttagtggttcgtacgtaagattttgagtttaggtgaggtcggggttt

SEQ ID NO: 213 - DNA, 2534 bp, Artificial Sequence
  chemically treated genomic DNA (Homo sapiens)
ggatttcggttttatttggatttaaagttttgcgtgcgggttattgagttatttagggagtttagggttttaatttagaggtttaaagttagggtttttaagttagattttagttttatttttagtttatcgttaagaattggaagagagataggaggagtgttataggggaattttattgagaggaaatatggttatatttagtagatatgtttttttttagtttcggttttgtattggcgcgcgcgtatatatatatatatatatatatatatatatttatttttagtttttgttattgtttagtttttagttataaggcgggatattttttaatttttacgattagaggtagtaggggtaggagggaggtaagaggaggggagaagtagtttggttttggggtcgggaggaagcgggtgcggagagtaggggtgggggtatgattagtggttaggtgcgtttaatagttgtaagaagagtgggatttttagttttaggtggttttagttttgttagtttttttttacggagttttttggagtaagaatagcgtttaggggagaagggtggggttttttattttatattagttttttcggtagggtgggggattggagggggtagggcggggcggtggcgggtaatatttagttttggggtttttggggagtttcgtttttttttttttcggcgttgtcggtcgtttatagtgttaggttgtttcgtagtagttgtatgatgagggtgttgtttttgtaggagttttcgttgagggtgtgtagattagttatggtttcgtcgaaagtggttttggttagagagatggttttttcggggttgttggcgatttcgtagtggaagacggaaaagtttagggttaggtttaggcggatggggttggtgggcggtattttttttttgttgatgtttatggttttttggtaggttgatcgggttgagttaatgatgcgttttttgtcgttatcggtggttatttcggttaggtagcggtagtagttattttttatttttaggtagaagattcggttttcggcgttttcggtttttttgatgaggtggttgtttagtaggtttagtacggtgtcgtatacgttttggagtttagtttttattttttttcggtatttacgtatttcgggttttttttttttcgagtttttttcgttgtttttttgtttaatattggatagtattttttaggtagttttttggtcgtttattacgtttttataggttattgagagtaggtttcgtttttcgtaggagagtttttcgtttttttttacggcgttttttatgaaggttgttatgtttttatagcgttcggtttgttttgttagtttggttttttggattagattggttttttttatggttttggggatatataggcgggcggcgggttaattgttgtttgggattaatgtcggattttgtgttttttttgtttttggtttgttttttggttgggtggttaggtttagagaagggtggggaggagtagggggcgggattagggtttaagatttgtttttttttttttttttttttatatttttttcggttttgtagtaaaggtaaaaaggttgggatgtgggggtgaattattagaatagttagtaggagaaatttgggcgtgggttttatttgtattggtatttttttaggttttaggttgtttttttttgttcggggttggtattatatggttgtttatattaggaaacggttttttaaattagatttatttttatagtgtttttttaggggttaaggattggttttagtttttggttgttttagtttcgatagagtttataaaggtttaggaggatggggtttttaattttgttaggtaatttttttttttggtttaggtgaggataatttatgtttaggtagggttatggagttttttaagtatttttatattacgatcgaatttaatttttattatgtttttgtgatatatataggattatagagatgggaatattaagttttagagaggggtgagatttgtttaaagttatatagttattaattttttgaaatttttttttgtattttttttttttagttttttttttattgaggtttttgatttatgagttttagattgtgtttggaagtgagatttaggtttttttttagtttatttgaagatggttttattttttaggttttatttttttttagggttttttttgagtttttagaatgcgtaggtggtagtttttagagtgtcgtttaatgaagtgtttaataagtagtttttgaagttttagtttagtttttgtaattagttatttagtaggtttgttggatatattttttattattatataatttttttttttaagttggtggtttgttgttatttgtttgaggatttattttttggttttttacgttaggttatttgttttttttaagttatatgttattaggtattagcggggtttatagagggtggggtttagtttttcggttgttttatttttttgttt

SEQ ID NO: 214 - DNA, 6558 bp, Artificial Sequence
  chemically treated genomic DNA (Homo sapiens)
taagattataaattgttttttattagtggggaaggttttaaatattatgtatttagtataagtaggtgtaattaatcgtaacggtttgttttgttattttcgattaatatataattattaggttagaattgtattttataagttttttgcgtttagttattttgtatatattaatttttttaagttttgtgttttaaaagaattgtatagtgttgggaagttttttatttattttaatttttagggtatcgagttcgaattcgaattaggtattaggtatgttttattattataaaagatgtaaaaagatgcgtatagtggcgtatatttatagttttagttattgaggaggttaatgtgggaggattatatgaggttgtagtgagttgtgatggtgttattgtattttagttttggcgatagtgagtttatgttttaaataagtaagtaaataaaaattaaaaagaatttagtttatagggtatttgaaggtaagaggaaaagatgttagaattagagatggggagaagatgggtttttggcgtttgttgaggttgagaaatgagatagataggttgagtgtggggtggagagaggatgggtagagagattgaggttggtttgaatggaaatgaaatgttagggtttttagggttatcggggaataattggagtttttaggaaaggtttaacgttgtgattatttgtgttcgttatgtttttttattttttattaattgtgtgaatttggtagattttgagttttagtgtttttttttgtgaagtggggttattttattttaatttttgggattgttgtgtgaattaaatggggtaatgtacggagagtatttgacgtatagcgagtgttttaaaattttagtttgtattttttagtaaaggatatgtatacgtttattgtgagtgataaatttaggatgatttgaatttaatgtgataacgtgggttttcgtatgttggttatgttgtcgggagatatttatggatttaattagtataataggggaaataaattatttaatgtattttgttaagatagaatattttagaatttattttgtggggcggggtataataaagggggtttttttgttgaaaacgtttaagtttaggttcgtggtattatttaattaaggtcgatagttatatagtaagttagaggtaatgttaggatttaaattaaatttgtggtttttataatgaggttattttttttttttttgaacggtttggggaaagggggtgggtgggtagaatttggtagtggttaattttttatttttgttttttggtttttttttgtttttatttttaggtttgtattgattgattgattgagatagggttttgttttgtcgtttaggttggagtgtagtggtacgattatggtttattgtagttttaaatttttaggtttaagtggttttttcgttttttatttttcgagtatttatatttttaggtttttaaaatggtttttaggtatttggttgtcgttttagatatttatttgggtttttgggtagggattgttcgggaaattttatttatgtgaagtaggtgtgggtgtaggaaggtcgtttggaaatgaattagtattgttttttgtttgagtcgtaagtagggcgttagagggtttggcggataagaaagggaggatgataggaggtcggtattgtaatgatacgttttagttattagagggtacgaagtagttgggtaaaatttcgcggggtcgttggtggaaaatttttggtatttggagttcggagatggggtggacggaatgtgaggatttagttttttgaggttgggtcggggtagagttattgttttggatgttcgtagggtttgtttgtgttttgattattttgtttttgtagatagttggagaatgtgagagtgggattgggatcggattttaggggttatttcgtataatttttttgttttgtcgtgggggagggagttgtttaaggttacgtagtaagttagtggtaaatgaatacgattattattagttttaggtatatggttatttgatgggcgtagtcgtagttttagtttttgagatagagatatttgattaaggataggtttttaggagttgattttagtgattcgcggttttgttgttgtttttgtttttttttttggtttttttatttgattgattttttgtttttttcgtttgtttgtttgttttcgtttttgttcgttggggggtttgtttaatttttttattgggttttgggagtcgtagttttttgttgttattttttagggatttgtagttttttgaagttttttttcgattcgttgtttcggttttatttttgggatttagaggagaggtgattatttcgtagtatagttagtggtgtgattttacggggtgagaaggatttttttgtttttaagtatttttttagtgatttttgttgttatgtggtagtcgtaagtattggttggtatttggtgtgggcgagatttttattttatgtagaaatgagtaagatcggtgagtttattatgtgggggtgaggttgagagaaaataagtatataggtgatttagttaaaattagaattttttaagtatatacgaaaagggtaaaaggggcgttttgtataggatagaataggtagatattgaattcggttgggttttgggaaggttttttgtagtggtttttgaagggggggttggattttagtaggatagagggtatgggtatgtgtgggtacgttttgaatagaggggttagcgtaagtcgagggttttggttatattagttgtatgtgtcggtgtgtttaagggatacgtagtagtaggtcgagtttggagcgttttattgttaggttttttaaaaatttttaattttaatttaattttattttatttttattttaagttttggtatatatgtgtagaatgtggtttgttatataggtatatatgtgttatggtggtttgttgtatttattaatttattatttaggttttaagtttcgtatgtattaggtattagttttaatgttttttttttttttgtttttattttttttttcgtaattgtttataggttttggtatgtggtgtttttttttttgtgtttatatgtttttattgtttaatttttatttatgagtgagaatatatcgtttggttttaagggatagttatggggatgtattgtagtttttgagtagggaaggttttgtggaggtttttagttaaaaggaaagaatggttgtgaaaatcgatgtattgcgtttttttgttttttatttttagtgtgaagggtttttatttcgagttttatttgaagtaggtttcgatgggaagataagtagtatgaggggtttaagtattgaggggagtaagggatattcggtggttgtgttaaggtgtagaagaggatattgggggttttaaggtttgattttatgtatattgtttaggttggtttttaagttatacggtgatcgttaggaagggattagtttgtttttagtttgatttttttgttatgttattatttaaagttttttttggtagggtttgtttggggtttttgtgttagtgttttttttgttaggttgggttggggtttttatttattgttttgggattgttgttgttttggttttgggggaggagggtgtgtcgttgagttattgtttgggtatttgggtttggaatttcgggtgagttatttagggttgaggtagaggggttgggggaggggaagaagttattcgatagttggagtagggaggggagttggggttataggaagggcggtgttttgatgtttagacgggtcgggatagataaagggttaaggaggaaggggttttgggagggggtagtttttttttgggttgggttttgaatggttatagtgtttgttttttttcgggtttggggaggatatgtgtgtggggggtagtgagagagggttgtggttgagggttgtgttttaggtttggattttggtttgggaagttgtttagttggtgtttttagttttgggtagggatgtatttttatttatttatttagtttttaagttggagaagaggaggttaaagtttttttgtttagtttttaattattcgggatttttttatgttttttatagattgtggtttagtttaattgcggttgtgtgtagagtaattttattttttattgtttttttatttttttagatatttttttatatagagggatttttttaggtatttttaagtatatttagttattttattattttattaagaggtattttggtgttggttattaaaagttattttattttatttatgttttgaagttagttttgtttttttttttttgatgttttttagttgttttttttggtttttagttttttaagggtggttttaggttgttttttttttatatatataggcgtatgtatgtatacgagtattggattatgaagttttagcgtgtgtttatagttttttatataggagtgggttgtgatttataggtatgttatgagaatgaggtttggtattagtttttaggttttagagtaggggttgtttttttttatttcggtttaggatgtttagtttttacgatattttttattttttattgtggtttgggtgggtttaggggttgtttttgatttggtttagagtttttttttagttggtggtggagttggtattttttgggagggagggggttgggagggaatgagtgggaatggtaagaggttagggtttggtgggattaggttgaggtaggtttggtttttttaaaatgttaagttgggggttagtggggtttatatataaatttttattttgggagtttggttgttttgtttttttttttgggtttgtttttgttatttggtttggtgagtatttttgttttgttgagggtagggtggggaggattttcgtgggtttttgtttttgtttttatagtttttttattttagtttttttggtgggattaatttgggtttttttgggtttttttttttggaagaattttttgtgaagtgttgaagtgttgattgaagggttttttttttttttttttttttttgagatggagtttcgttttgtcgtttaggttggagtatagtggtgtgattttagtttattgtaaatttttttttttaggtttacgttatttttttgttttagtttttcgagtagttgggattgtaggcgtttattattatgttcggttaatttttttgtatttttagtagagatggggttttattatgttagttaggatggtttcgattttttgatttcgtgatttatttatttcggttttttaaagtgttgggattataggagtaagttatcgcgttcggtcgattgaagggtttttttttaggtttttttgtgaggttttagtgtaggggttgttttgaggtttttttttggatattttagtttaggggtttttttttgggggtttaggtttaggagtaggaggtgtgtatgtgggcgttgttgtaaaaagaattttgagatttttttttttttttttttttttttttgtaaagttttggattttagtaggattaaggtgtaagaggtaggggttttaagattttgtttgggttatggttttaagtagtaaagttttgttttttgtttcggtgaaggtagggttggtatgatgggtttagggtatgttttgtttttggtatagtttttttggttttattttgaaatttgtttaatttttttaggttggtttgagtatttttagaggttttgtcgttgaggtttgttttattttgattttaaggtaatgaatattttatatttttaattttaattttaataggattttttttggtggagagaatgttaagttgtttttattttatttatgtttttgtttgtttagaggtttaggggtttttagggtgaggggagatatattttttattttttgggagtttttagtttgagagaggaaatatttttgtttaagggagtttttagttagatggtagagagagatgtttttggttttaggagtttcgagtttaaggagggaaacgatttttttagggagttttttgtttttaggttgtagttatggtttttgttagattgtataggagtttttatttgttagtcggtgtatgtggttttgttttttagagtttgcgtagatgttattaaaatgggattttggttattttgttattttttttttggtagatattaaaatggggagttttgtttttaggggggtgttttaagtgttattagaggaggtttggtgatttttagatataagggaagttttagcgtttgtttttagggtgagatggaggtatcgttttcggttttagggaattatagtttgagggggagatgtagtttttgtttttttatttagagaggggttttgtgaggtggtttgggggtatagggtagaagtggattttataggttgagttaaggttttaagagttttagtagtgtatttattatttggtatttttgtagt

SEQ ID NO: 215 - DNA, 6558 bp, Artificial Sequence
  chemically treated genomic DNA (Homo sapiens)
gttgtagaggtgttaggtgatgggtatattgttgaggtttttggggttttagtttagtttgtaggatttatttttgttttatgtttttaagttattttataaaatttttttttgaatgggaaggtaggggttgtattttttttttagattgtggttttttgaggtcggaggcgatatttttattttattttgagggtagacgttaaagttttttttgtgtttgggagttattaagttttttttgatggtatttgggatatttttttgagggtagggttttttattttagtgtttgttagaagggaaatgatagggtgattagagttttattttgatggtatttgcgtaggttttggggagtagggttatatgtatcggttggtagatgggggtttttgtgtagtttggtaggagttatggttatagtttaggagtaggaagttttttgaaggagtcgtttttttttttagattcgggatttttgaagttagaggtatttttttttgttatttaattggaagtttttttgggtaggagtgtttttttttttagattaggagtttttagagggtggggaatgtgtttttttttattttgaaggtttttgagtttttaggtagataggggtatggatagggtgggggtaatttaatattttttttattaggaaggattttgttggaattagaattaaagatatgaaatgtttattgttttgggattaggatgggatagattttagcggtaaggtttttgagaatatttagattagtttggaaaggttaggtaggttttagggtgaggttagaggagttatgttagaggtagggtatgttttgggtttattatgttagttttgtttttatcgaggtagggggtagagttttgttgtttggggttatgatttaggtagagttttgagatttttgttttttgtattttagttttgttagaatttaggattttgtaaaaaaaaaaaaaaaaaaaaaaaaaaattttaggattttttttgtagtaacgtttatatgtatattttttgtttttaggtttagatttttaaagaagggtttttagattgagatatttaggggagggttttagagtaatttttgtattgagattttatagaggaatttggagaaaaattttttagtcggtcgggcgcggtggtttatttttgtaattttagtattttgggaggtcgagatgggtggattacgagattaggagatcgagattattttggttaatatggtgaaattttatttttattaaaaatataaaaaaattagtcgggtatggtggtgggcgtttgtagttttagttattcgggaggttgaggtaggagaatggcgtgaatttgggagggggagtttgtagtgagttgagattatattattgtattttagtttgggcgatagagcgagattttattttaaaaaaaaaaaaaaaaaaaaaaaattttttagttaatattttagtattttatagagagtttttttaagggggaaggtttagagaggtttaggttgattttattagggaagttggaatgagagaattgtggagataaagatagagatttacggggattttttttattttgtttttagtaggatagaggtatttattagattaggtggtagagatagatttaggaaggagagtaaggtagttaggtttttagggtgaggatttatatgtgggttttattggtttttaatttggtattttaaggaaattaaatttgttttaatttgattttattaaattttggttttttgttatttttatttatttttttttagtttttttttttttagagagtgttagttttattattagttgggggagggttttaggttaggttaagggtagtttttgagtttatttaggttatagtgggaagtgggaggtgtcgtggggattgggtattttggatcggggtgaggggaggtaatttttgttttggggtttggagattggtgttaggttttatttttatgatatgtttgtgagttatagtttatttttgtgtgagaggttgtgagtatacgttgagattttatggtttagtgttcgtgtatatatatgcgtttgtgtgtgtgagagagaagtaatttggggttatttttaggaagttgggggttagaggaggtagttgggggatattaggaggagaaggataggattgattttagggtatggatgaagtggagtgatttttaatggttagtattagaatattttttaatgaggtaatgaggtaattaagtgtgtttagaaatatttgggaaggtttttttgtgtaggaaggtgtttggaaggatggggaagtagtgagaaatggggttgttttatatatagtcgtagttgggttgggttatagtttgtggggagtataaggaagtttcgagtagttaaaggttgaataggaaaattttggtttttttttttttagtttgagggttgggtgggtgggtaggggtatatttttatttaaggttgaaaatattagttggatagttttttaagttagaatttaggtttgaagtatagtttttagttatagtttttttttattgttttttatatatatgttttttttagattcggagaaaggtaaatattgtggttatttagagtttagtttaagggagggttgtttttttttagggtttttttttttttggttttttgtttatttcggttcgtttgggtattagggtatcgttttttttgtggttttagtttttttttttgttttagttgtcgagtagttttttttttttttttagtttttttattttagttttaagtgatttattcgaggttttaggtttagatgtttaggtagtgatttagcggtatattttttttttttagggttagggtagtagtagttttagagtagtaggtggaagttttagtttagtttggtagggaaagtattggtatagagattttaaataggttttgttaggaggagttttggataatgatatggtaggaggattagattgagaataggttggtttttttttagcggttatcgtgtgatttgggggttagtttgagtagtgtatatgaagttaggttttggggtttttagtgtttttttttatattttggtatagttatcgagtgttttttgttttttttagtatttgaattttttatgttatttgtttttttatcgaggtttattttaagtagaattcggaataaaaattttttatattgagggtgagggataagggagcgtaatgtatcgatttttatagttattttttttttttaattaagggtttttatagggttttttttgtttagaaattgtagtgtatttttatggttgttttttaaagttaggcggtatgtttttatttataagtgggagttgaataatgagaatatatggatatagggaagggaatattatatattagggtttgtgggtagttgcggggagaaggatgggggtaaggggagggagagtattaggattaatatttgatgtatgcggggtttaaaatttagatgatgggttgataggtgtagtaaattattatggtatatgtatatttatgtaataaattatattttgtatatgtatgttagaatttaaagtaaaaataaaataaaattaaattaaaattaaaaatttttaaaaagtttggtagtgaggcgttttagattcggtttgttgttgcgtgttttttaaatatatcggtatatgtaattagtgtggttaagattttcggtttgcgttgatttttttgtttagaacgtgtttatatatgtttatgttttttattttgttgaaatttaattttttttttaaaggttattgtagggagtttttttagggtttaatcggatttagtgtttatttgttttgttttgtataaagcgttttttttgtttttttcgtgtgtatttagagaattttgattttgattgaattatttgtgtatttgtttttttttagttttatttttatatggtgagtttatcggttttatttatttttgtatgaggtaagggtttcgtttatattaggtgttaattagtgtttacggttattatatggtaataggggttattggaggagtgtttaggagtaagggagttttttttatttcgtgaaattatattattgattatgttacgaaataattattttttttttggattttaagagtggaatcgagataacgggtcggaaaagagttttagagagttataaatttttgaggagtgatagtaggaaattgcggtttttaggatttagtgagggagttgagtaaattttttagcgggtagagacggagataggtaggtagacgaagaagataaagagttagttagatggaaaagttagggagaaaaatagagatagtagtagagtcgcgggttattagggttagtttttgaaggtttgtttttaattaggtgtttttgttttaggaattgaggttgcgattgcgtttattaaatggttatatatttgagattggtgataatcgtatttatttgttattaatttgttgcgtaattttgggtaatttttttttttacggtagggtaggagagttgtacggaatggtttttagagttcgattttaattttatttttatattttttagttgtttataaaggtagagtagttaagatataagtaggttttgcggatatttaaagtagtgattttgtttcggtttagttttaggaagttgggtttttatatttcgtttattttattttcgggttttaggtgttagaaattttttattagcggtttcgcgggattttgtttagttgtttcgtgttttttggtggttaaggcgtgttattgtagtgtcggttttttgttatttttttttttttgttcgttagattttttggcgttttgtttacgatttaaataggagatagtgttgatttatttttaagcggtttttttatatttatatttgttttatatagatgaggtttttcggatagtttttgtttagaagtttaggtggatgtttgagacggtagttagatatttggaagttattttaaaagtttagggatatgggtattcgggagataggaggcggaaagattatttgagtttaggagtttgaggttgtagtgagttatgatcgtgttattgtattttagtttggacgatagagtaagattttgttttaattaattaattaatgtaagtttagagataagggtaggagaaaattaggggatagaagtgagggattggttattgttaagttttgtttatttattttttttttttaggtcgtttaggggaaagagaaatggttttattgtgggggttataggtttagtttaagttttgatattgtttttggtttattgtgtgattgtcgattttggttgagtggtgttacgaatttgagtttaaacgtttttagtagaaggattttttttattatgtttcgttttataaaataagttttgaggtattttgttttagtaaaatgtattaaataatttattttttttgttgtattaattggatttataagtgtttttcggtagtatgattagtatgcgaggatttacgttattatattgggtttaggttattttggatttgttatttataatgggcgtgtgtatattttttgttggggggtgtagattgaaattttgaagtattcgttgtgcgttaggtgtttttcgtatattattttatttaatttatataataattttaggagttggaataagatgattttattttatagaggagaatattgagatttaaagtttgttaaatttatataattagtaaggggtggggaggtatgacgaatataggtggttataacgttaaattttttttagaagttttaattatttttcgataattttgagagttttaatattttatttttatttagattagttttagtttttttgtttattttttttttattttatatttagtttatttgttttattttttaattttagtaggcgttagaagtttattttttttttatttttgattttggtattttttttttttgtttttaaatgttttgtggattggattttttttaatttttgtttatttatttatttgagatatagatttattgtcgttaaggttggagtatagtggtattattatagtttattgtagttttatgtgatttttttatattaatttttttagtaattggggttataggtgtgcgttattgtgcgtatttttttgtattttttgtggtgatggagtatgtttgatatttgattcgaattcgagttcggtattttaaggattggaatgggtaaagaattttttagtattgtatagtttttttaaagtataaagtttgggagaattaatatatgtaggataattgaacgtaagagatttgtggaatgtagttttaatttgataattgtgtgttaatcgggagtaataggataggtcgttacggttggttatatttatttatgttagatgtataatgtttggagttttttttattgatgagaagtaatttatgattttg

SEQ ID NO: 216 - DNA, 6432 bp, Artificial Sequence
  chemically treated genomic DNA (Homo sapiens)
tattacgtttagttaattttcgtatttttagtagagatagggttttataatgttggttaggttggtttcgaaattttgattttatgatttgtttgtttcggttttttaaagtgttggaattataggtataagttagtatgttcggtttatattttttaattgtatgtataatttaatttgtagatgattttaaaagtttaaattggagttttattgttttttttatttttagtttttataataaattttatgatagtttttgtttataagaatttttttgtagttttattatttgtaaattatttaattttgttttttcgtgattttttattttttatattttttatattttttagttattgttttaaaaattttggataataaattaatttaaatttttttttaaacggtatttatttatttttatttagatttatatggattggttagaggtaggtttgagattggttgatggaggtttggtttagatttaattaggaggttggtttatatttgttttatatgtttttttttttttttgtatttgttggtttttaagtgtttttaattgaaaataattagtatattaaagtagtatattttggagtggtattttttgaaattttttattggttaggtggcgaagattaattatttgattaatttgttttagagtgtagaataagtttggaattagataggattaagtttaaatttgggttttgttttttattagttatgtgatttttgttaaatatttaatttttttaatttttaaattttttatttgtaaagggaagattagaatagtattgtaaggatatgttttaaaatttaataaggattatttttggataatagggttaagaatttttttaaagtttgtttttaaaaaaaaaatttaaattttttatttataattaatacgtattatttttgtaatttttaaaaagttattttttttaaaatatattattgatgttttttgtaaatatgtggtataattgtaggttttattaatatttgtgaagaattgtaaataagagaatggattaggaaaattgatatttttatttttttttttattgaagataagaaatatatattgaatattgattatttgtagagtacggagtgtggttttatattgaaaaaggaatattttgtgtttttaagggttttataattattagggtagaattttaaaaagtaaataaataataataatgtattttatgttagaatggggtaaatatttttttttaaaaaaaggttaaataaacgaaatgttttttgggttatttttgggaaaggagtgattatagtaggtgaagtattataaaatattttttggaggaggtagtattatggatgatttataaagggtggatgatttttataaattaattatagttttagtgtttattggtttgttttataataaaaggaaaattggttaagagataagagttgagaatgaggttggttaatttataaggagaggaatttttttgttaattgttttagttgatagtaattttaatagttgtatgttataaagtttaggggagtaggaagttttttttttattataattgagaaatttaacgtttaaataaattataatttgatttagtttaattgtgtgtgtttgtgtgtgcgtgtagagtttaaaaagttggtaaaatagattgttagtttttaaaatttttgtttaagttgatatttattgttttttaatttattaagggtttaaacgttattttttttgttttttaaattttgagtcgggttattatttttttgtttttatttgtaaatggtttagttttttatatgtatatattaattgtttatgtgaatatataaaatattatattaagttaaatatataattatgtgtgaaaatgatgttttgattaagggtattagatattttttttaataagaattttaaaaggaagggtattatgataattttttttttttttttttttatttattttttgtttttgagatagggttttattttgttttttaggttgaagtgtagtggtataattatggtttattgtagcgttcgttttttgggtttaagtgatttttttattttagttttttgagtagttggtattatagatatatgttaatatgtttggtttttttttttttttttttttttttagtaaagatgaaattttattatgttgtttaggttggtttcgaatttttgggtttaagtaatttttttatttagattttttaaagtgttgggattataggtgtggattattgtatttagtttgatgaatttttaaaattattaaattgtaatatgtatgagtttatatatttattatttttattatgatgatttttaaaaggttagtttgtatttggtaatgttgaattttgattttttttaattttataggagattggagattaaattagaaatgttaagggtaaataaaattaaaattaatattaatgatgtattatggtaaagattattagttaaatattttattatagatttaaatatttagtttttaataatgtaaaatatttttgtgataattaaggaaaataaagtttttggaatttattggatatttatttgttatattgtgtttttaggagaaagaaagtatatgtttgttatttggaggaatttgggtaaatgtaggaaaaaaaaaagaagaagaaagaaatttatatatttttttatttttaagaaaaggaagtagtggtgatattattttcggttaaaatgtagtttgtttatattttaaatattcggtaataatgttttttttagagttatgaagtaattagaataattaaatataatttttttttaaatttttattgtttgatttatttatttatttaataaatatttattaaatatcgattatgtgtttgatgtttagggatataatagtaagtggagggaaagatatataatatttgtttttaagaaatttggagttgagtggaggatagaaatataaattaaagaatgatataaataattataaagttatagttgttaaaagaaaagtatatggtgttaagagaacgtgtaatataagatttatttatggaggtgagggaaagtttgtttattaaagaagttatgatttaatttacgaagattaggagttggttgggtgaagaaaaaaaggttagaggaaggaagtttatattggggaaggttttaagtataaagggtaggaggattatagaggtatatttacgaaatttggagaaggtttttagtaagtaaggagaagttaaatgaaagtttacgggagagttggaggtttgaagatacgtttaaggatttggtttttattttttttttattttaagagtagtgggaagttattaaatgattttaattagagggttggtataattagttttgtattttgaaaagttgaatttagttttcgtttgagaaattgagtgaaagagtttagaacggtcgtggttgagggtgattcgtgggagatttttatataagttatggtagtggtatgggttggtggtagaagagggaatagggagaagatttggaatttaatttttttttattgataaagttattttagttttggtaaggtaattaattggtgggaaagaagatgtttagtttttttgattttattgtattttttgtatttttaatatgagtattgggaagtggtaaaatatttagaggtagtttgggtgttaggtggagtatgagttaaaattttaggatgaagtaaatgaatatttagaatgataggaaagatttgggagttgggtttgggggagggttatttatttttattttttggagattttggtataaatttttgtttttgtaattttttttttaggtaaaggaatttattaaatgaattgttagaagatttattgattagagggttgtatagaattatatttttgagagtgggaagtaggttgattatatagtttattatttaattaggatatatttgaaagagaaagggggttttattaatatttaaattataaaatatgtatattaggaatgttttgggtaaatttggttgttttagtaagaaaggaaatttgaaagtttatattgttttgtttttatgttatttcgtttgtatatgagagggtaagtattttttttttttatttgtattaagggaataaaagtataagtatttaggtgatttttaatttatttttaattttatagtttttgttatattttatatattttgaaaattatattttttattattattatttcgtgataggtgattatttataattatttattgatttagtttcgggaagaggcggtgtaaaatgggacgttttatttaggtgtttattagaaatgtagaatttttgtttgttttttagatttattgaattagaatttgtatttttaaataagatttttaggtgattaatatgtatattaaaatttgagaaaaatttttagatttcgatttaaagaaaaatattttataatttgatagtgtatgtatatatatatatgtatatagatataattgaagtataaatttaatgaagtagaatttatcgttattattttatttgggaaagaaatgtgttcgcgatttaatagattggagtatttatttttggattttaatttgtaatttgaaaacgtatttttaaagtatttaggagtaatttgaagaaagttgaggggaggcggtagatgttttgatttattagggaaaacgtggacgttttttgttgttattttgtgaattgtgtgtatttagttatttttgagtaaatatttggagcgaggaatttttgagtggtgtgggagggcggtgaggggtagttgaaagtcggttaaagttttcggaggggttggtttaggaaatatgattggtagttacgagagagttaggggttggacgtcgaggagagggagaaggttttcgggcggagagaggttttgtttagttgttggcgaggagttttttgtttttttcgtagcgttgagttgaagttgagtgagttattcgcgcgtacggagcgacgatattttcgcgcgtgtattcgttcgggataggagtcggatttttgtgtagtttttttcggtcgtcgggggttttttcgcgtttcgtcggtttttaggtttttttttggttggcgagcgggcgttatatttggttcgtatatttgcgttgtcggttcggcgcggggttcggagagggcgcggcgcggaggcgtagttaggggttcgggaaggcgtcgttcgttgcgttgggggttcggtttatgacgagtagcggggtttgttatgggtcgggggttgtttaggggtttgtggtcgttgtatatcgttttgtggacgcgtatcgttagtacgattttatcgtacgtttagaagtcgggtgagtggtttttagttcgggttcggcggggcgtcgggggtttttttggggttttcgttttttcgttgcgtttgatagtcgggttcggtaattcggttttcgggcggaaacgaggaaagtttttttcgcgatatttacgtagttcgattttcgtagttgtagggattgtgagttttttttgaaaaagagaaggaaagtttagttgtaaggggcgcggggtacgtttggttttttttgtgcgagtaggaaaggcgttgtgttggtcgcgttcgaggcgagtttttattttcggaaagggaagtttgagaagttggttatttgaaggcggtcggggagtagcggttcggagcggtagtttgagttgttaaagtagttagcgtatttgggttatttcgtttatggcgatgtcgcgtgtttatttagttttttttgagttattcgtttaaaaggttagttttttagtttttagtttttggagacggttacgtttttttttaggtcggttttttggttcggagtttttggaaataagttttaagaaaataatcgatttttaaaagaaagttagttggttttattgacgttttggtatggatggatagggagtggagatgtttaggtgaaatcgagaattttttattgaatgtttattgggtgttagaggttgtagattttgtttggaataagatagttttgtttttagggagttgatggttttatgtaattatcgtttgttggaaatcgaagggttaaaattttaattaggttatttatttgatcgttgtttttgaaggtttttaaggaaaaaataaaaataaaaaaatatatatatatattatatatatataaatatatatataattatatatataaatatatataatattaatatatatatgtatgtaggaatgggggtttttaattatttgttatggaaagtgtaaaatttttgagattttaaaagttagattttttttttttggagacggagtttcgtttt

SEQ ID NO: 217 - DNA, 6432 bp, Artificial Sequence
  chemically treated genomic DNA (Homo sapiens)
agagcgagatttcgtttttaaaaaaaaaaaatttaatttttgaagttttagaggttttatattttttataataaatagttaagaatttttatttttgtatgtatatatatattaatattatatatatttatatatataattatatatatatttatatatatataatatatatatatatttttttatttttattttttttttaaaaatttttagagatagcgattaggtgggtagtttagttaggattttaatttttcggtttttaataaacgataattgtatagaattattaattttttgaagataggattattttgttttaggtaaaatttatagtttttagtatttagtaggtatttagtgagggattttcggttttatttgagtatttttattttttatttatttatgttaaggcgttagtggagttagttaatttttttttggaaatcgattatttttttgaaatttgtttttaaaaatttcgggttaagaagtcggtttgagggaaagcgtggtcgtttttaggagttaaggattgaggagttggttttttgaacgggtggtttaaaaagagttgggtgggtacgcggtatcgttatgggcggagtggtttaggtgcgttggttgttttggtagtttaggttgtcgtttcgggtcgttgtttttcggtcgtttttagataattaattttttaaattttttttttcgggggtgggggttcgtttcgaacgcggttaatataacgttttttttgttcgtataaaggggattaaacgtgtttcgcgttttttgtaattgaatttttttttttttttttaagaaaaatttataatttttgtagttacgggagtcgggttgcgtgagtgtcgcgggggaaatttttttcgttttcgttcgggggtcgggttgtcgggttcgattgttaagcgtagcggagaggcggggattttaggaagattttcggcgtttcgtcgagttcgggttggggattatttattcgatttttgaacgtgcggtgggatcgtgttggcgatacgcgtttataggacgatgtgtagcggttataggtttttgagtagttttcgatttatggtagatttcgttgttcgttatagatcgagtttttagcgtagcggacggcgttttttcggatttttggttgcgttttcgcgtcgcgtttttttcggatttcgcgtcgggtcggtagcgtagatgtgcgggttagatgtggcgttcgttcgttagttaggagggggtttggaggtcggcgaggcgcggggaggttttcggcggtcgagggaagttgtataggagttcggtttttgtttcgagcgggtgtacgcgcgggggtgtcgtcgtttcgtgcgcgcgagtgatttatttaattttaatttagcgttgcgggggaaataggaaatttttcgttaatagttgggtaggattttttttcgttcgagagtttttttttttttttcgacgtttagtttttagttttttcgtagttgttaattatgttttttagattagttttttcgagagttttggtcgatttttagttgttttttatcgtttttttatattatttaggagtttttcgttttaagtatttatttaagaatgattaagtgtatatagtttataaagtaataatagaaaacgtttacgttttttttagtagattagaatatttgtcgtttttttttagttttttttagattgtttttaggtgttttagagatgcgtttttaaattgtaagttgagatttaggagtgaatattttaatttattgagtcgcgagtatattttttttttaaataaaatagtaacggtaaattttattttattaaatttgtgttttagttgtgtttatatgtatgtatgtatgtgtatatattgttaagttgtaaaatgtttttttttaggtcgaagtttagaggttttttttaagttttaatgtatatattgattatttggaaattttatttaaaaatgtagattttaatttagtaggtttaggaggtaggtagagattttgtatttttaatgagtatttggatagagcgttttattttgtatcgttttttttcgggattgagttagtgagtaattgtaaatgattatttattacgaagtgatagtggtgggaaatgtaatttttagaatgtatagagtatagtagaaattgtaaaattaaaagtgggttgggagttatttgaatgtttgtgtttttatttttttaatgtaggtgaagaaagagaatatttatttttttatgtgtaaacggggtaatatgggagtagaatagtataaatttttaaatttttttttttgttagggtaattagatttgtttaagatatttttggtgtatatgttttgtagtttaaatattaatagaatttttttttttttttagatatgttttgattggataataaattatgtgattaatttattttttatttttaaagatatgattttgtatagttttttggttagtagattttttagtaatttatttaatgaatttttttatttgagaggaagattgtagaggtaagggtttgtgttagggtttttagggaataaaggtaaatagtttttttttaaatttaatttttaaattttttttgttattttaagtgtttatttgttttattttggaattttaatttatgttttatttagtatttaagttgtttttggatgttttgttattttttagtatttatgttgaagatgtagaaagtgtagtgaaattaggagggttaggtatttttttttttattaattaattgttttgttaaagttggagtgattttgttaatggaggaagattgagttttaaattttttttttatttttttttttgttattagtttatgttattgttatggtttgtgtaggagttttttacgagttatttttagttacggtcgttttgggtttttttatttagttttttaaacgagagttgaatttagttttttaaaatataaaattagttatattaattttttgattaaaattatttaatggttttttattgtttttgagataaagagaagataaaaattagatttttgaacgtgtttttaagtttttaattttttcgtaaatttttatttggtttttttttgtttattgaaagttttttttaaatttcgtgaatatgtttttgtaatttttttattttttatgtttagagttttttttagtgtggattttttttttttgatttttttttttttatttagttaatttttggttttcgtggattgaattataatttttttgatgggtaagtttttttttatttttatgagtagattttgtattatacgtttttttggtattatatgttttttttttaatagttgtaattttataattatttgtgttattttttaatttatatttttattttttatttaattttaaattttttgagggtaggtattatgtatttttttttttatttattattgtgtttttaagtattaaatatataatcgatgtttaataaatatttgttggatgaatgaatgaattaggtaataaagatttagaagaaaattgtatttgattgttttagttgttttataattttggagaaaatattgttatcgaatatttgagatataaatagattatattttagtcgagaatgatgttattattattttttttttttaagaatggagaagtatgtgggtttttttttttttttttttttttttttatatttgtttaagtttttttagatagtaaatatgtatttttttttttttgaaaatataatgtggtaaataaatgtttaatagattttaaaagttttgttttttttaattattataaagatgttttatattgttggaggttagatatttaaatttatggtggaatgtttaattggtggtttttgttatgatatattattaatgttgattttaattttgtttgtttttaatatttttgatttaatttttagttttttgtgaaattgagaagaattagaatttagtattgttaagtgtaagttagttttttgaaaattattataataaaaataatagatgtgtaaatttatgtatattgtaatttgataattttaaaaatttattaggttgagtgtagtggtttatatttgtaattttagtattttgggaggtttagatgggaggattatttgagtttaggagttcgagattagtttaagtaatatagtgagattttatttttattaaaaaaaaaaaaaaaaaaaaaaaagttaggtatgttggtatgtatttatagtgttaattatttaggaggttgaggtgggagaattatttgagtttaggagacgaacgttgtagtgagttatgattgtgttattgtattttagtttagaagatagaatgagattttgttttaaaaataaaaaataaataaaagaaaaagaaaaaaaaattgttatgatgtttttttttttgaaatttttgttgaaagggatgtttgatatttttaattaagatattatttttatatatagttgtatatttggtttagtataatattttgtgtatttatataagtagttaatatatatatgtaaaaaattgggttatttgtaaatgggaataaaaaaataatagttcgatttagggtttaaaaaataaggaaggtaacgtttaagtttttaatgagttgaaaaataataaatattaatttgaatagaaattttaaaagttgataatttattttattagttttttaaattttgtacgtatatataaatatatataattgaattgaattaaattgtggtttatttaaacgttgggttttttagttgtgatgagagaagaattttttatttttttgagttttgtgatatgtagttgttgaggttattgttagttagagtagttaatagggagatttttttttttataaattaattagttttatttttagtttttattttttgattaattttttttttattgtgaagtaaattaataagtattgagattgtagttaatttgtgagggttatttattttttgtgggttatttatgatgttattttttttaggaaatattttgtgatgttttatttattgtgattattttttttttagggataatttagggaatatttcgtttatttagtttttttttaaaaaaaaatgtttgttttattttaatatggagtatattattgttatttatttgttttttagaattttattttaatgattgtaaagtttttaaaagtataaaatattttttttttaatgtagaattatatttcgtgttttatagataattagtatttagtgtgtgttttttgtttttaatagagagaaaaataagaatattagtttttttaatttatttttttgtttgtagttttttatagatattaatagaatttgtaattatgttatatgtttatagaaagtattaatagtatgttttgaaaaaaataattttttgaaaattataagggtaatacgtgttaattataggtaggaaatttagattttttttttaaaggtagattttaaaaggatttttaattttattatttaaagataatttttgttaaattttggagtatgtttttgtagtattattttaattttttttttataaatgaagaatttgaggattaaagagattaagtatttgataaaggttatatagttagtaaaagatagagtttagatttgaatttagttttgtttagttttagatttgttttatattttagaataaattgattaggtggttgattttcgttatttgattagtgaaggattttaggaaatgttattttaaaatatgttgttttggtatattgattatttttagttgaaggtatttaaagattagtaaatgtagggaggaggagagatatgtggaatagatgtggattaattttttgattgaatttaagttagatttttattagttaattttaagtttatttttagttaatttatatgagtttgagtaagaataagtaaatgtcgtttaaggaaaaatttgggttggtttgttatttagaatttttgaggtaatagttaagagatataagggatgtgaagggtgaggaattacggaaaagtaaggttaaataatttgtaggtggtaaaattataaaggggtttttatagataaaaattattatgaggtttgttatgggggttgaagatgaggaagatagtaggattttaatttagatttttaggattatttataaattaaattgtatatatagttaaagaatatgggtcgggtatgttggtttatgtttgtaattttagtattttgggaggtcgaggtaggtagattatgaggttaggatttcgagattagtttgattaatattgtgaaattttgtttttattaaaaatacgaaaattagttgagcgtggtg

SEQ ID NO: 218 - DNA, 7309 bp, Artificial Sequence
  chemically treated genomic DNA (Homo sapiens)
atgcgattaatggtgttaattgttttttggattgtttttatagtataggataagattatattagttttagtaggttttattgaagaaagtttatgtgttttgtagaaataagatttttagtttagtttaataggagattaattatatgtttattttatttttttttaaggtatgatagtatttggttgagatgtttgtgtgtattttttgtgtgaagttgagtatgtaatttttaaagaaattataaaggagttattcgtttttaaaggaaaaatatatgaattttacgggtataaggaagatattaaaatagggttggggagaagtttttttttttttattttatagtattttttatagaaataattgattgtttgaatatatggttattgaaatatatatatatatatatatatgtatatgaaaataagagttggaatatttgattttgttttttattttttattattttagataatataggatataatatggttttattgtatatatgtgttttttggtttaaaaatattgagagtagatttttgtggaaagaaatatgaaaatttgaggatttatgcgaatgtagttagaggcgaatgtagttagaggggtttttaatttgttggtagagttgggggagagttggggtaattttattgttatgaaattggttttagatggaggtaaggaaaggtgtttattttttgttggtgttagatatagagagattttgtagtatttcgtattttaggtttagaattgtttagtgttgggtagtagttttattgagggtttggttagagtttatggggatgggtggattaggttgtttgttgtttggaaaaggttattttgaatataatgatttttatatggacggtggggtttgggggaaggtatcgtggttagggtttggaggggaagagggaggaaagtaaagaggagtttttttatgaggtaatagaaatgatagtattttttttaggttgaatttttaaaatttagttttgttttggaagattgggattgtggtattttttgtagtgtttttagatcgttttaaggtttttaaattaatgatttataattatgttgtttttttagagagtatttttttttttggttgatatgtggttagtttaggggtggaggagtttcggtagttacgaatttagacgggatgttgattgagagttttgtggttatggtagatgggaggggtgagttttatttatttaaaggtattcgtattttatcgatgagtgtggaattgtgttttttcgttttcgtagtgagacgatcgattaggattgtaggttgagtaaatgggtgttttttggtttatagcgttttttagtattagttagcgggatagagtttcgtgaattttttaaggagttattatttgtttgtttgaatgttggaaaggggtcggtggtgttgattattggatttatttaattaatatttattaaattcgttgttattaatatttaatttttgtgttttaggggtttagattttagtaagggaaatagatgggtaaataattatattagagttagttaagtattgttaaagaagttgatatagggtgttgtggggatatatgggaggggaattagaggaggtttttcggaggaggtgatatttaagttgaggtttgaaggatgtggaagagtttagtaatttttgaagattaaaaaaatggtgataaaaaagatatttttttaattttttagtgttacgatttaagagataaataagtaggtgaacgtataattatattgggttttattataagttagagtttgttttttttaggattttggtattataattttttttgaaattttgttttcggtattgatttttgggggaggtagtaatataggaatttagtgttcgttgcgaaattgatggatggtttttagttttgggtacgtttttatgtgttaaatttgtttaaatggtaggatttattttttttttagaagtatttatttgttttataggattttttatggaattttggagtttttgaggcgagagggattttggatattattgagttttattttttatttaataaatatagaagtggacgtttggataggtaaagtgatttgattaaggtaggtgtatagttattttgtaatattgggaataaattttaggttttttgattttttgtttttattttattttttttttattttttagaaataaagtttttatgtgtttttttttatagtgatatgtttggaatgtattagttagtaatttaggaagggaaaaaaataaatatataagagataaatttgttaggaggataaatttgtattgtttttgattggtttagagggtgattattattatggtagagaattatttaattagtgtaagtaaaatttttttgtgggttgggtattgtataaagatttaaacgaatttgtttatagatttgaaaagtagatacgagatttgtgaatggttggggtttttaagtttatagtataagtatgggttatattttatagtttggaggattgagttttgaaaatgggtaagtttttttatttttttgaattttattttttttatatttaaaataaggatgagtagtttttgaggttttttttacgatttttttttttatagattttagtattttataatttgatataaagagggtggatatgaatttattttttttagaaaagttttaggaaagagaatattaggttattttagtaggtgtgtagataggttagatagattttgaaatttatttagttttttttagatgtataattttattattgtttttagttgttaagagaaagtaggagagtttgtatttttattttttttttttttttttttttttttggagacggagttttattttattatttaggttagagtgtagtggtatgattttagtttattgtaagtttcgttttttaggtttacgttatttttttgttttagttttttaagtaattgggattataggcgtttattattatatttggttaattttttgtgttgttagtatagacggggttttattatgttagttaggatggtttcgattttttgatttcgtgattcgtttattttggttttttaaagtgttgggattataggcgtgagttatcgtatttagtttgtatttttatttttattgttagttttaggtttattttatttagtttattaagtgatgttgaataattaatttttatatattattaggtttatggatattatgatatttagattgatgggtgtttgttgaagggggtgattttagtaggaggatttttttacgtaaggatttatggagtttgttgttttttttttttagggtgagaattaaattgtttttatacggtgggtagaggggaattgatttaggtttggaataagagagaatattttaattgaaaagtttttggaattcgttgaattttaagatattgtgtggattagtttaggatagggagtgagaagaaattaattaaaaggtaatttcgttattttttagttggaaaaaagattagattatatttgtgtttttataattaagtagttgttggaaaaaaacgttttagatgttttttatgagaaaattgttgtttgaagtttagtagaagttatttatttgatatttatattttaggtaaggtttttcgttggagaaaatatcggtattttggataaaattgaaatgtgaaaagaaagggaagagagggtttttattatgtaagatgtttatttaaagtggatttggtttggaaagttttttaaaattttttatatgattgtggaataagttatgtggggcgcggggataagcgaattttttaaattttattacgtatgtttttatttaatttggatttttagagtggtttttagggtattttgtttaggatttagttagttgttggttatatttatgttttttagttttttgagattttatttggttttgagagggttaaaaagtagtgtggttaaatattttaggttttaaagtatttttattgtggttggggaagtaatagaattatattttataaaataatgaaaatagtgttagaaaaatatcgagagatagaaatatttttacgagttaggttatagttagagtgaaggtagggaaggtttttaaagttgggtggaggggataagttaaaaagatgtggaaattggttttttttttttatggttaaagtgtttaaaggggaaaaaggagttttaaaaatgtttttggaaatattattttttacgaatttttcggtttttgttgttttaatgttatttgtttgagatgtaaatagaggagttttgagaaagaagttgaatttgtatttttttttgtttttatttgttttaaatttgtggtatttttaataggatgaagcggaagagaaagggaaagagataaaagtgtagaaagatggaagattttagttgtaaatggttatttgtagttagatggaatagttgttgacgtttagggaaatgtatgtttttttttagatgggaaggagtagtggaaaggggtgacgagtttttggttggttattaattattttatttttttgtgtcggttttttatttggaaagtgggagtgatatttgtgtttgttttttttatttataaagattattgtgagagttataatacggtgagatatagaattttgtttttaaaaatataaagtagaattaagatgttaataataaggatagtaattgtgttagttatttgtaattatttattatagttagtcgtttaggattttggatcgtttttttggttttattatagttttggattagtttatttttaaattttttgttgaagggtggagttttgttagttatgggtagggaattatttttttttgtttttttattttttgttttttaaatatgtttagggtttttgtatttgttgttttttttgtttggtattttttttttgtggtttgttttagagttgatttttgtttttgtttattttttagcgaggatggtattttagggagttttttttttattatcgtagagagagtaggttttttttagttatgtttaatttagaattttgttttgttttttttatagttttagtattatagaaaattattttgtgtatttatggatgtttacgggggtaagggttttgtgttgtttaatttagtattttgaatcgtgtttgttgaatgaatatagaatttcgtttgttttgggagagtatagaaaatagttttttattatatattatagttagttgtaaatagtagatggttttttatattttagagagtaagaattagagagagagagaaagagagagagtttgggttttttttttttgtgtttgttttttttagagaaattggaggggtagtagttagtattttttcgttggttttattaagtatagttaaggtttttaggatatggttattttttatttgtggaagcggttttgttggggtgggtgggtgttagttggttttggtttgggttagagatatttagtggtttaggtgggcgtggggttagggcgtagacgagaaggggtacgagggtttcgtttcgaggatttagcggtaagtatcggtttcgggcgcgttttagtttatttattcgcgtgtttacggcggtattattttttataaggatttgaacgattcgggggcggtttcgtttcgttattttttgttttcggtttcgttttttttttggagggtcgatgaggtaatgcggttttgttattggtttgagggggcgggttttaatagttcgaggcggggttttcgggggtttagcgttatattattcggtcgtttaggtagcggcgtagagcgggtagtaggtaggcggcgggcgtttagacggtttttttttttttttttgtttttttagtttttgttttttcgtcgggaggtcgttcgtcgagttttgcgttagcgtcgaggtagtttcgttgcgttttatttcgtttcgtcgggtattcggagggtagcgcgtcggaggttaaggttgtttcgtacggttcggcgggcgagcgagttcgggttgtagtagtttcgtcggcggcgcgtacggtaattttggagaggcgagtagtagtttcggtagcggcggtagtagcggtaatgattttttggttcgggtttatcgtgtttttgggtagttggagtttgggggattggggcgtcgaggcgtgtatatgttcgtttagttatttttaggacgttttttgtaatttcgatatcggtaagcgtttttggtgtttcgttcgagttttacgttgtagttaggattgtagcgttgtttagggaggtagggcgagttttattttttttttttgttttaggagaggggtagacggggttggggcggagtggagaaattcgatgtttttgggcgggggcgttggtatagttgagaggggaagatgttttgtagaggaaatttatagtggttgagggagtttttggtcgtttttgtttttttaatttaggtcgtgaggtttttatcggtttttttgatatttggaaaatgtttttatttattattaacggaggaagggttagaagagaagggtggggaaagggtttttaaaatttggaatgttaattaaagtgttgggaaattgaatagttaaaaaaaaaaaaaaaagttgttcgttatgtgtacggaaagttgtaggagaaatttggagtatttcgagtttgtattattttttgcgtttatgaaatttattttttttattgagatttaatttagttgtaggttttttaggtaagcgttaatcgagtttttgggattgttaagtttgggtggatttaagggggaaaatgaggagaaagttgtggtattgatttacgttttggaggtattgtgtttgagagtgttgatagttagtagaaggtgcgaggggttatttattatatagttgtgaaaatttataggaaggttattttttttttttttgaatgtgtgtggggagggggagaatgggtagtggaaaatagatttgttattaaaagaataaatttgttaagggttatattacggtgatagttttagattggatttagtgttttgagtagagagattttgtaaagagattttttattttttagtgtgtatggagggtttcgagagtattttgggaggtttgtttgggagtgtttgggatatttgtgtttggatggttaaaggtggagtggtatttgggaaatatttttttttttttttttagtttataaag

SEQ ID NO: 219 - DNA, 7309 bp, Artificial Sequence
  chemically treated genomic DNA (Homo sapiens)
ttttatgggttggaaaggaggagagagatgttttttagatgttattttatttttagttatttaaatataagtgttttaaatatttttagataagttttttaggatgttttcggggttttttatatatattaaggagtaggaggtttttttatagggtttttttatttaagatattaagtttagtttggaattgttatcgtgatgtgatttttggtaggtttgtttttttggtgataaatttgttttttattatttattttttttttttttatatatatttaagggggaaaaaaatagtttttttgtgaatttttatagttatgtggtgagtgatttttcgtattttttgttggttattaatatttttaaatatagtgtttttagggcgtgggttaatgttatagttttttttttatttttttttttaaatttatttaaatttggtagttttagaagttcggttagcgtttgtttgggaagtttgtagttgggttgggttttagtgaaaagaatgaattttataggcgtaggagatgatgtagattcggagtattttaagttttttttgtaatttttcgtgtatatggcgggtaatttttttttttttttttaattatttaattttttagtattttagttagtattttaagttttgggaattttttttttattttttttttttagtttttttttcgttagtagtgaatggggatattttttagatgttaaaaggatcggtaggaattttacgatttaagttaggaaagtaaaggcggttaggggtttttttagttattgtgagttttttttgtagggtattttttttttttagttatgttagcgttttcgtttaaggatatcgagtttttttatttcgttttaatttcgtttgttttttttttggggtagaggaaaggagtggggttcgttttgtttttttaagtagcgttgtagttttggttgtagcgtggggttcgggcggggtattaggagcgtttatcgatgtcggagttgtagaaggcgttttgggggtggttgggcgagtatgtgtacgtttcggcgttttagttttttaggttttagttgtttaggagtacgatgagttcgagttaaggggttattgtcgttgttgtcgtcgttgtcggggttgttgttcgtttttttaaagttgtcgtgcgcgtcgtcggcggggttgttgtagttcgagttcgttcgttcgtcgggtcgtgcggggtaattttggttttcggcgcgttgtttttcgagtgttcggcgggacgggatggggcgtagcgaggttgtttcggcgttggcgtaggattcggcgggcggtttttcggcgaaggagtaggagttggaggagtaagaggaggaggagaagtcgtttgagcgttcgtcgtttgtttgttgttcgttttgcgtcgttgtttgggcggtcgagtgatatagcgttgggttttcggggatttcgtttcgggttgttggggttcgtttttttagattaatggtagagtcgtattattttatcggttttttaaaaagggggcggggtcgggggtaaggggtaacggggcggggtcgttttcggatcgtttagatttttatagggaataatgtcgtcgtgggtacgcgagtgggtgggttggggcgcgttcgggatcggtgtttgtcgttgggttttcggagcggagttttcgtgttttttttcgtttgcgttttggttttacgtttatttgggttattgggtgtttttgatttaaattagaattaattaatatttatttattttagtaggatcgtttttataggtgaggggtggttatgttttagagattttgattgtgtttggtggaattagcgggggaatgttaattgttatttttttagtttttttggagagagtaggtatagaggagaaagatttaaattttttttttttttttttttttttggtttttattttttgggatatgggaagttatttgttgtttgtagttggttatgatatatgatagaagattgttttttgtgtttttttagagtaaacggggttttgtatttatttaataaatacggtttaggatgttgggttaagtaatataaagtttttgttttcgtggatatttatgaatgtatagggtgattttttgtgatgttagggttatgaagaaaataaaatagagttttgggttggatatgattggggagggtttgttttttttgcgatagtaagggaagggttttttgaagtgttattttcgttgagaagtggataaagataaggattagttttggggtaagttataggagagaggtattaggtagggggaatagtaagtgtaaagattttgggtatgtttgaaagatagaaagtagaaaggtaagaggaagtggttttttgtttatggttgatagagttttattttttagtaagggatttgggggtgagttgatttaaaattgtagtaaaattaggagaacgatttaggattttagacgattagttataatagatgattgtagataattaatataattattatttttattattgatattttgattttgttttgtatttttaaaagtaggattttgtattttatcgtattatagtttttataataatttttgtgggtaggaaaagtaagtataagtattatttttattttttagatgaggaatcggtatagaaagatgggatgattggtggttagttaggaattcgttatttttttttattgtttttttttatttgaagagagatatgtatttttttgaacgttagtagttgttttatttaattgtaaatggttatttgtagttgggattttttatttttttatatttttgtttttttttttttttttttcgttttattttgttagaaatgttataagtttggaataaatagaaatagggagaaatgtaagtttagttttttttttagaatttttttgtttatattttagataagtgatattgggatagtagaggtcgaagaattcgtgagagatggtatttttaagaatatttttgaaattttttttttttttttgagtattttagttataggaaagggaaattagtttttatatttttttgatttgttttttttatttagttttaaaaattttttttgtttttattttaattgtggtttaattcgtagagatgtttttgtttttcgatgtttttttagtattgtttttattgttttatggggtatgattttattgtttttttaattatagtaggaatattttgaggtttgggatatttagttatattgttttttagtttttttagaattaaatagggttttaggagattggagagtatgggtgtggttaatagttgattgagttttgagtagagtgttttggaggttattttaaggatttaggttgaatgagggtatacgtggtggaatttgagagattcgtttattttcgcgttttatatgatttattttatagttatgtggaaggttttagaagattttttagattaaatttattttggataagtattttatatgatagaggtttttttttttttttttttttatattttagttttgtttaaagtgtcgatattttttttaacggaaggttttgtttggaatataagtattaagtagataatttttgttgaattttaagtagtagtttttttatagaaagtatttgaagcgtttttttttagtagttatttaattatgaaagtataagtataatttgattttttttttagttgaaaagtaacgaaattattttttggttaatttttttttattttttattttaagttggtttatatagtgttttgaagtttagcgaattttaagagttttttagttgggatgtttttttttattttaaatttgagttagtttttttttgtttatcgtgtgaaggtagtttggtttttattttaaggaaaagaaatagtaaattttatgaatttttgcgtaggggagtttttttgttagggttattttttttagtaggtatttattagtttggatgttatggtgtttatgagtttaataatatgtaagaattggttatttaatattatttaataagttaggtggggtgaatttgaggttaatagtaagaatgaagatgtaggttgggtgcggtggtttacgtttgtaattttagtattttgagaggttaaggtgggcggattacgaggttaggagatcgagattattttggttaatatggtgaaatttcgtttgtattaataatataaaaaattagttaggtgtggtggtgggcgtttgtagttttagttatttgggaggttgaggtaggagaatggcgtgaatttgggaggcggagtttgtagtgagttgagattatgttattgtattttagtttaggtgatggagtgagatttcgtttttaaaaaaaaaaaaaaaaaaaaaaagaatgaagatgtaggtttttttgtttttttttgatagttaagaataatgatagagttatatatttgggaagaattgagtaagttttaagatttatttggtttgtttatatatttattaggatgatttggtatttttttttttggaatttttttaggaaaggtgagtttatatttattttttttgtattaagttataggatgttagagtttgtaggaagagaagtcgtaaaaaggattttagaaattatttatttttgttttaaatgtgggaaaaataaggtttagagaagtgaaggaatttgtttatttttagggtttagttttttaagttgtaaggtgtggtttatgtttgtattgtgggtttggaaattttagttatttatagatttcgtatttgttttttagatttgtagatagattcgtttgagtttttgtatagtgtttagtttatagagaaattttatttatattgattaaataattttttattatgataataattattttttgagttaattagaagtaatataggtttgtttttttgataggtttattttttgtgtgtttatttttttttttttttaaattattagttaatgtattttaaatatattattataaaaaaaagtatatgaaaattttgtttttgggaaatgaaaagagagtaaagtggaaataaaaaattaaaagatttgagatttgtttttaatgttgtagaatagttgtgtatttgttttggttaagttattttgtttgtttaggcgtttatttttgtgtttattggatgaaagatagaatttagtggtatttaggatttttttcgttttaaaaattttaagattttatggggaattttgtaggataagtgaatgtttttgaaggggagatgggttttgttatttaaataggtttgatatatgggaacgtatttaagattgaagattatttattagtttcgtaacgaatattgagtttttatattgttattttttttaagaattaatgtcgaaaatagaattttagagaagattgtgatgttaaagttttaggagagataggttttggtttatggtggagtttagtgtagttatgcgtttatttgtttgtttgttttttggatcgtagtattaaaaagttaggaaggtgttttttttattattatttttttggtttttaggagttattgaatttttttatattttttagattttagtttagatgttatttttttcgggaaattttttttgattttttttttatgtatttttataatattttgtattaatttttttgataatatttagttgattttaatgtgattatttatttatttgttttttttgttggagtttaagtttttagaatatagggattaagtgttggtaataacgagtttaataagtattggttgaatgggtttaatgattagtattatcgatttttttttagtatttagataggtaggtggtggttttttggagagtttacggagttttatttcgttggttggtgttagggggcgttataagttagagaatatttatttgtttagtttgtagttttggtcggtcgttttattgcgagggcgggagagtataattttatatttatcggtggggtgcgggtgtttttgagtgggtgaagtttattttttttatttgttatggttataaagtttttagttaatatttcgtttgggttcgtggttgtcggagtttttttatttttgagttggttatatgttaattaaagggggagatgttttttggggaagtaatatagttgtgaattattggtttgggggttttagggcggtttgggaatattgtagaggatgttatagttttagttttttagggtagagttgggttttggaaatttaatttggagaaggtattgttatttttgttgttttatagggaagtttttttttgtttttttttttttttttttttagattttagttacgatgtttttttttaagttttatcgtttatgtgaaagttattatatttaaaatggttttttttaagtaatagatagtttggtttatttatttttatgagttttggttagatttttagtggggttgttgtttagtattgggtaattttgagtttaagatgcgaggtattgtaggatttttttgtgtttggtattagtagggggtaaatatttttttttgtttttatttggagttaattttatggtagtaaaattgttttagtttttttttagttttgttagtaaattgaagatttttttggttatattcgtttttggttatattcgtatgaatttttaggtttttatatttttttttatagggatttatttttagtgtttttaagttagaaaatatatgtgtgtagtaaagttatgttgtattttgtgttatttagggtggtgggaaatggaaagtagagttaaatattttagtttttgtttttatgtgtatgtatgtgtgtgtatgtatgttttaatgattatatatttaagtagttaattatttttgtgaagggtattatgaaatggaaggagaagaatttttttttaattttgttttaatgttttttttatgttcgtggagtttatgtgttttttttttaaaaacgagtagtttttttgtggtttttttgaaggttgtatgtttagttttatatagagaatatatataagtattttagttaggtgttgttatgttttgggagggaatgggatggatatgtggttggttttttgttagattgggttggaggttttgtttttgtaaggtatatgagttttttttagtggaatttgttggaattgatatggttttgttttgtgttgtggggatagtttaaagagtagttaatattattgatcgtat

SEQ ID NO: 220 - DNA, 15863 bp, Artificial Sequence
  chemically treated genomic DNA (Homo sapiens)
agttttaatttcgtaggtttaagcgatttttttattttagttttttaagtagttgggattataggtttaatttttttgatagagataggatttggttgtgttattaaggttggttttaaatttttgggtttaagtatttttttattttggttttttaaagtgttgggattataggtatgagttattatattagttataaaaattttttgaatataaatttattggttaggagtagtgtttacgtttgtaattttagtattttaggaggcgtaaatgggtggattatttgaggtcgggagtttgagattagtttggttaatttggcgaaattttatttttattttaaatattttaattagtcgggtgcggtggtgcgtgtttgtaattttagttatttaggaagttgaggtagtagaatcgtttgaatcgggatatagaggttgtagtgaggtaagattatattattgttttttagtttgggttatagagcgagattttgttttaaaattttttttttttaaagaaagttaaaaagaatataaattgattatttgtattgtaagatatattttttaaaatgttttaatattataattattaatattataattacgatttcgatgaattattttcgagagttgaaaatttgatagtcgttattatcgttttagaaagtagtataaaaaagaaagagtgttgatggaggaggagaaggtttagtagagttttgagtgtttgagtgttttagcgtagggaggtggagatagtgatttatgttgttaagagatgtagtgaggcgaatttagagaatgatttaagaggggttgggcgcggggtttatgtttgtaattttagtattttgggaggtcgaggtaggaggattacgaggttaggagatcgagattatggtgaaatttcgtttttattaaaaatataaaaaattagttaggcgtggtggcgggcgtttgtagttttagttattcgggagaggttgaggtaggagaatggcgtgatttcgggaggtagagtttgtagtgagttgagatggcgttattgtattttagttgggtgatagagcgagattttgttttaaaaaaaaaaaaaaaatattttttttatgattttttaaataaattttaaatgttttatttataagaattaatacgacgtggttgtttttttttgtttttatttttttgttttttttatttgttttagtttggttatattagtattttgggttttttgttttgtgtttgtttgtttgtttgtttgtttgtttgtttgttttgggatggagttttattttgttatttaggttggagtgtagtgatatgattttggtttattgtaatttttattttttgggtttaaatgatttttttgttttagttttttaagtagttgggattataggtatttattattatatttagttaatttttgtatttttgtagagatgaggttttgttatgttggttaggttggttttaaatttttgattttaggtgatttgtttattttagttttttaaagtgttgggattataggtgtgagttattgagtttagtttgttttgttgttttttgagatggagttttattttgtcgtttaggttggagtgtagtggtataattttgtttgattgtagtttttattttttgagtttaagagatttttttgttttagttatataagtagttgggattataggcgcgtgttattatatgcgtttaattttggtatttttagtagcgatggggttttgttatattggttaggttggtttcgaatttttggttttaagtgatttgtatatttcggttttttgagtagttgggattataggcgtgagttattatgtagggtttttttggttttttaacgtataaagttattttttagttttgggtgtttatagtattattgttagtttttggaaagttttttttagaagtttttatatgattgattttttatttttttttaggttttagtttaaatgttttttttttagagagtttttttttgattattttatgtaatgtgtttttttttagttagtttttttttattttgtgtattttttttagagtatttattattattttggttttgatgtttgttggtttatatgtttgttgtttgttttttatatagaaagtaaattagttttttatttgttttgtttattattttattttagtatagtgattaatatatattagtagttaattaataaatagttataagttaggtacggtgatttatatttgtgattttcgtattttgggaggttaaggtgggcggattttttgaggttaggaatttgatattagtttgtttaatatggcgaaatttcgtttttattaaaattataaaaattagtcgagtgtgatggcgtgcgtttgtaatattagttatttgtgaggttgaggtaggagaatcgtttgaattcgggaggtagaggttgtagtgagtcgagattatattatagtattttagtttgggtgatagagtaagattttgttttaaaaaaataagaaatagaaatatatatatgttgttataagaaatttattattttttagtaaaaaatatagatttttaattaaagaaaggggaaatttttttttaaataattttagaattcggggtagaaaacgttatatgtggaaattcgttttgaaaaatagtttcgtttgtgaataggaaatatttggattatattttttttatttttacgaaggatttaaatgtgtagtattgatgaagaggtagttagttttagtttttattatttttgtatattttatttgtttttttttatggtatagttttgggggtaggttataaattcgtaagatgttattagtattattggttaagatgtaggaatcgttaggagttttagaaataggggagagttagaaagttggttagatttatgttttttaagtgtagggttagggttgagtttgtttttggggtaggtaagtttttttgaatttttgagggaagtagaagatataaattgttagataaaatgtaagtttagtttaaaagggttacgtgtcgttttttttagttttggggtattttttttttagaaaattggattgttttatagtgaaaatttcgggggtggttagttttttgtttcgttgttatttttattatttatagttttttaagaagtttttaggttgggtgttgaattttgattaggaattattgagaaatcgaggtagttgggagaagttgtagttttaagcgttgaaaggaagatgggggataataaatttgggtcgttaagtaaagggggtagaggtttggagaagtgggttttaggattagaggatagatcgattttatattttatttttttagattttatattttattgttattattatttacgtgtttttttcgttttttgtagcgggttttttagaggtattttttatggtttttttagattttaattttggttcgttcgttttttttttagaaaggttttcgtttgttttttttgtaggaaggtttgtatttttagaaagtttttgtttttcgattcgaggatttaatttattaggggaattaaattttgtttttaggggagtggagagagaaattgggtttttttttcgtagtttttgggatatagttgagttagttataggatttggggataatcggggcggattttttttttcgggaggcggtggtattagtttagagttcgtatttttatttatcggggaagcgtggggagaaggatgggttggagttgggttttggtttgaaggatagtagttcggagttaacggttgagtttttaaagtttttatattgtagaggaagtatagcggagattagttttagttaggatggtttcgaagtttttagggattcgacgtagagttaaagaaatttatttgtgtttttttttttttttgggagtaggtagaagattttcgggaggagaggcgaatagcggacgttaatttttttgaaagtattgtgttttttagtatcgcgggtcgttacgggttttttgttgtcgcgggatttcggtttatttttcgattgggtcgtcgtatttcggattagatttcgcgggcgatttacggaattcgcggagtcgggacgtgaaaggttagaaggtttttcgtttttattaagttttagggtttttcgtggttgttgggagttgtagtttgaacgtttttattttggcgagaagcgtttacgttttttttatcgagtttcgcggtaatttttaaagtatttgtatcgttttttcgtcgtttgtagagggcgtagtaggttttgtattttttttgtattttattttttaggttttagatttgttttttttatttaaaaaatatttattatcgagtttttatttgttatttagtattgatataggtatttaggaatataataatgaataagatagtagaaaaattttatatttttataaggtttacgtttttatgtattgaaagtaatgaataaataaattttattagagtgataagggttgtgaaggagattaaataagatggtgtgatataaagtatttgggagaaaacgttagggtgtgatattacggaaagtttttttaaaaaatgatattttaattgatgagaagaaaggatttagttgagagtaaacgtaaaagtttttttttttttattttttatatttgatataatgtaggatttttttaaaatgatttttattaattttgtttttatagttttggtttgtagaattttttattttaaaatgttagtatttacggtattaggtcggcgagaattttgattttgtatttttttttttaattttattttttttgtttttttcggtaggcggattatttgtttttatttgttatggcgattgtttagttttgtgttaggagtttcgtaggggttgatgggattggggttttttttttttatgtgtttaagattggcgttaaaagttttgagttttttaaaagtttagagttatcgtttagggagtaggtagttgttgggtttcggggatattttgcgttcgggttgggagcgtgttttttacgacggtgatacgtttttttggattgggtaagtttttgattgaatttgatgagttttttttgagttacgggttttcggtttcgtgtatttttagttcgggaaaatcgttggggttgggggtggggtagtggggatttagcgagtttgggggtgagtgggatggaagtttggttagagggattattataggagttgtattgttgggagatttgggtgtagatgatggggatgttaggattattcgaatttaaagttgaacgtttaggtagaggagtggagttttggggaattttgagtcggtttaaagcgtatttttttgtatatttattcggtgttgggcgtagggaatttttgaaataaaagatgtataaagtattgaggtttgagatttttggatttcgaaatattgagaatttatagttgtatattttagagtttatggtattttagtgaaaattggggttttatttcgaaatgattatttgggggtgattcggggagtttaagttgttaaggttttataattttcggatttttgttttttttggagcgatttttttaggtagttttcggtttcgttagatggagaaaatttaattgaaggttgttagtcgtggaagtgagaagtgttaaattaggggtttgttcgttaggtcgaggaggatcgtcgtaatttgagaggttcggtagttttgttattgtttggttttatatttatatttttgttttttgtagtagtattttcggtttttttttgtcggagtagtttattatttattcgatgagaggggaggagagagagagaaaatgttttttaggtcggttttttttatttggtagagggaggttgttatttttcgtttgtatttttttttttggattatttagttatggtttttgtaaaggtaggggtatttgttttgatgtaaattttaatttttttttttttttgaatggtgtgttttatttttcgggtcgtttgtaatttaggcggacgttattatggcgtagatagggagggaaagaagtgtgtagaaggtaagttcggaggtatttttaagaatgagtatattttattttttcggagaaaaaaaaaaaagaatggtacgtttgagaatgaaattttgaaagagtgtaatgatgggtcgtttgataatttgtcgggaaaaataatttatttgttatttagttttgggttaggttattttagttttagacgtaggttgaacgtcgtgaagcggaaggggcgggttcgtaggcgttcgtgtggtttttcgtgtagttttcggttcgagtcggttttttttggtaggaggcggaattcgaatttatttttttcgttgttttattttttagttcgcggttgttttatttcgtagtttttttttatgtatttgtcgcgtatcggttattttgtgtcgtatttacgttattttttttttaaatcgaggtggtatttatatatagcgttagtgtatatagtaagtgtataggaagatgagttttggtttttaatcgtttcgtgatgtttattaagttatagattttttttatcgttttagaaacgttttattacgtttttttttagtcgattttcgattttatttttattttgatttttataattattttgtttgttggagaattttatatagaatggaattaggatgggcgttgtggtttacgtttgtattttggtttacgtttgtattttgggaggtcgaggcgggcggattatttgaggataggagttttagattagcgtggttaacgtggtgaattttcgtttttattaaaaaatataaaaattagttgggcgtggtgggtgtttgtaattttagttattcgggagggtgaggtaggagaatcgtttgaattcgggaggtagaggttgtagtgagttaagatcgtgttattatattttagtttgggcgataagaacgaaatttcgttttaaaaaaaaggggggaattatatattatgtgtttatttttgtcgggtttttgttttttaatgtattgtttgatattcgtttatgttgtatatattagtattttgtttttttttatttagtatagtttatcgattgtatattcgtttttttgatggttttttgagttgttttttatttgcggttatgaaataaagttgttataaatatttttgtataattttttttgtgattatatgttttcgtgttttttggagaaatatttaggaggggaattgtggaggaagtaaaaagtagttgtattttgaatttttttagaagttttgagttttttagagcggttgtattattttatattttaattagtaaggtatgggagttattatggttgtgttatagtttttcggatattaggtatgttagtttttttaatgtggtatatttttgtggttgtaatttatagttttttattgattaaggatgtttagtatttttttatgtgtttattggttattcgtattttgtttgtaaagtagtttttcgagttttttatttgttattttggtttttttgtttgtttttattgtttagttgtgggattgttttatattttttggatataagtttttattagatttatgagtcgtgaatgtttttttttgatttgttgcgggtttatttgtttgttttatagagtttatagaattttaagaggagtggattaattttttttatgtttagtatttgttttgttttgtttaggatatttttttttttttttttaattttagggttatgaagatataattttatatttttttttaggatttttatggtggtaagttttatagtaaggtttttaagttattaattaatttttaaaattaattgtttatggtgtgaggtgtaggagttagtttttggtattttttttgtatggaaatttagttattttgtttttatttgttgaaataggttttttttttttattgaatgtttttaattttaattattttatagttggagtatagggttattattttagtgttattttttttttttttttgttaatttttgagatagggatttatattgttgtttaggttagagtataatggtataattaaggtttattgtagtttcgaatttttgggtttaagtagttttttagtagttttacgagtagttgggattattttattatatttagttaattattttatttttttgtattgataggattttattatgttgtttaggttggttttaaattgttggttttaagtttttattttatttcggttttttaaagtgttgggattataggtgtgagttattatgtttgattttttagtgttattttttatttattttttttgttttttgttttttttaaacgttggaggaagaaatagtatttattttatataaattttttagaaaatagaggaatagattgggcgcggtggtttatatttgtaattttagtattttggtacgttgaggtaggggattatttgaggtcgggagttcgagattagtttggttaatacggcgaaattttatttttattaaaatataaaagtagttaggcgtgtattatatttgtaatgttagttatttaggaggttgaggtataagaattttttgaatttgggaagcggaggttgtagtgagtcgagattgcgttattgtattttagtttgggtaatagagtgagattttgttttagaaaaaaaaagaaagaaagaaaaaatagaggaatattttttaatttgttttcgaagttaggataattttggtattaaaattaaataaggatattataagaaaagaaaatatagattaatatttttgttagtatagatatgtaatagttaattaattttagtaaattaaatttggtaatatagaaaaaaggataaataggttagtcgcggtggtttacgtttgtaattttagtattttgggaggttgaggtaggtagattatttgaggttaggagtttgagattagtttgattaatatggtgaaatttcgtttttaataaaaatataaaaattaggttgggtacggtggtttacgtttgtaattttagtattttgggaggtcgaggtgggtagattacgaggttaggagtttaagattagtttgattaatgtggtgaaacgttatttttattaaaaatacgaaaattagtcggtgtggtggtatttgtttgtaattttagttatttaggaggttgaggtagaattgtttgaattcgggaggtagaggttgtagtgagttaagatcgtgttattgtattttagtttgggcgatagagtaagattttattttaaaaaaaaaaaaaattagttgggtatggtggtgggtatttgaaattttagttattcgggagtttgaggtaggagaatcgtttgaatttaggaggtagaagttgtattgagttgggattatattattgtattttagtttgggtaatagagtgagattttattttaaaaaaagaaaaagaaaaaggataaatatattttaattaaataatgtttattttatgattgtagttgatttaatatttaaaaattggtttggtgtagtagtttaggtttgtaattttaatattttaggaggttgaggtaggaagattttttgagtttaggattttaagattagtttgggtaatatagttagattggtttttattggggggaaaaaaattagtttgtgtaatttattatattaataaagggaaatataaaaattttatgattattttaatagatgtagtaaaagtagttaatgatattaatatatatgtatgattataaattaattaattttttagtaaattagggaaaggaaatttaattagtttgataatagggcgtttatagtcggagttttattagtagtatatataatggtagaaaatttagtgttgttgggggcggtggtttacgtttgtaatgttagcgttttgggaggtttaggcgggcggattacgaggttaggagatcgagattgttttgattagtatgttgaaatttcgtttttattaaaaatataaaaataaaaaattagtcgggtatggtggcgggcgtttatagtgttagttattcgggaggttgaggcgagagaatggcgtgaattcgggaggcggagtttgtagagtttagatcgtgttattgtattttagtttgggtgatagagtgagatttcgttttaaaaaaaaaaaaaaaaaaaaaagaaaagaaaatttaacgtttttttttttaagattaggaattagaaaaggatttgatttttataacgttgatattatattggaggttttaattaggtaagaaaaagaaataatgagggtcgggtgcggtggtttaggtttgtaattttagtattttgggaagtcgagacgggtggattacgaggttaggagatcgagttattttggttaatacggtgaaattttgtttttattaaatatataaaaaattagtcgggcgtggtggcgggcgtttgtagttttagttattcgggaggttgaggtaggagaatggcgtgaatttagggggcggagtttgtagtgagttgagatcgagttattgtattttagtttgggcgatagagtaagattgtgttttaaaaaaaaaaaaagaaaaagaaataatgattagtggttcgatgttttacgttagtaattttagtattttgggaggtcgaggtgggtagattatttgaggtttggagttggagattagtttgataaagatggtgaaatttcgtttttattaaaatattaaaaaaatagttaggcgttggtcgggtatagtggtttatgtttgtaattttagtattttgggaggtcgaggtgggtggattatttgaggttaggagtttaatattagtttggttaatatggtgaaattttatttttattaaaaatataaaattagtcgggcgtagtggcgggcgtttgtaattttagttatttgggaggtttaggtaggagaatcgtttgaatttgggaggcggaggttgtagtgagtcgagattgtattattgtattttagtttgggtgataaaagtaaaaatttcgttttaaaaaaaaaagaattagttaggggtagtggtgaacgtttgtagttttagttatttaggaggtagaggtaggagaattatttgaatttcggaggtagaggttgtagtgagtcgagattgttttattgtattttagtttaggcgagaagagtaaaattttatgttaaaaaaaaaaaaaaaaaaggaaagaaaaaaaataacgattagaaaggaagaaattaaatatatttatagttagtatgattttatatatattatggttttaatggggttaggcgtggtggtttatgttgtaattttagtatttttaggaggttgaggtaggtggtttttttgggattagttggttaatatggtgaaattttaattttaataaaaatataaaaaattagttaggcgtggtgagggtatttttaattttagttatttaggaggttgaggtaggagaattgtttggatttgggaggtagaggttgtagtgagtcgagatcgcgttattgtattttagtttgggtaataagagtgaaatttcggtagggtgtggttttacgtttgtaattttagtatttcgggaggttgagttaggtcgattatttgaggttaggagtttgagattaatttaatatggtgaaatttcgtttttattaaaaatataagaattagttgggtgtagtggtgggcgtttgtaattttagttatttgggaggttgagatagaagaattgtttgaatttaggaggtggaggttgtagtgagttgagattatgttattgtatattacgtcgggtaatagagcgagatttcgttttaaaaaaaaaaaaaagatgaaattttattttaaaaaaaaaaaaaagttttaatggaaaatttataaaaagttattaaaattaataaataaatatagtagggttgtaggttatagggtaatatagttatttttttatttgtaggggtttggttttgggattttttatatattaaatttatagatgtttaagttttatatataagacggaatagtatttaatttatatatatttttttatatagtttaaattatttagattatttatattatttttatataatgaaaatgttaatgtatatgtaagtatgtatgtaagtatttgtattatattgtttagggaattattggatagataggtttttaagattgatattagtagttattgttaagattttggttaggtttgtttttgtttggggttttagttgattttattgtttttttatttagttaagggtatttgtattttttttggttttttggttatttggaaggtttagtttagtttggtatatttgtattttggtttattgatgttggtatttttgggaaggttttgttttgaaaaatacggagattttagttgttattgaagatttgagagataaagatagggagatttgtttgtagatttgtgtttttttaagtgggattgagattttgggttttttattttaggatagtattttttggtttgttgattgaatagatttttgaaggaggtgtagttgtattttaggagtgggggtgggagtagtattattgattcgtattaataattatatagttttttttagaataataatatagaataagtgaaatagaataattgtagaaagagttaatttttgttgagtttttattgtgtgtttagtattttttttaattttatattttttataatatatagagtattaggtaggcggggtttgggggtttacgtttgtaattttagtattttaggaggttaaggggggtggattatttgaggtcgggagtttaagattagtttgattaatatggtgaaatttcgtttttattagaagtataaaattagttaggtgtggtggtatatgtttgtagttttagttatttagtaggttgaggtaggagaattatttgaattcgggaggaggttgtagtaagcggagatagtgttattgtattttagtttgggtaataagagttgagatttcgttttaaaataaaataaaataaaataaaataaaataaaataaaataaaaaaagaaaagagtttgttattaaaggagttgtttggtaggggatgttttgttagtgtaaataatagaaaagtgggttgggtatagtggtttatgtttgtaattttagtattttgggaggttaaggcgggcggattatttgaagttgggagtttaagattagtttgattaatatggagaaatttcgtttttattaaaaatataaaattagtcgggcgtagtggtcgatgtttgtaattttagttattcgggaggttgaggtaggagaatcgtttgaatttgggaggtagaggttgcggtgagtcgagatcgtattattgtattttagtttggacgagagtaaaattttgttttaaaaaaaaaaaaaaatagaaaagtgtaataaatatttatagtaggtatgttttttagtaaatttgatgataaatttggtataaagaaagagagtatttttgaaaaaaaaaaaaagaaaaagaaagagagtattttgtttgggtaatatagtgaaattttgtttttataaaaaaatttaaaaattggtcgggtgtagtggtttatatttgtaattttagtattttgggagtcggaggcgggaggattatttgaggttaggagttcgaaattagtttggttaatatggtaaaattttatttttattaaaaatataaaaaattaattaggcgtattggtgggcgtttgtaattttagttatttaggaagttgaggtaagaggatcgtttgatattgggaggtggaggttatagtgagtcgagattatattattgtattttagtttgggtgatagggcgagatttcgtttttaaaaaaaaaaagaaaaagaaaaagattaaaaaattagttaggtaggtttttgtggttttagttatttgggaggttgaggtaggagaattattgagtttaggagtggtaggttgtagtgagttatgattgtattattgtattttagtttgggttttaaagtaagattttgttttaaaagaaaaaagaaagaaagaaagaatatggcgggttaggtatagtggtttatatttgtaattttagcgttttgagaggtcgaggtaggtggattataaggttaggagttttatattagtttggttaatatggtgaaattttgtttttattaaaaatataaaaaattagtaggtagggtggtaggggtttgtaattttagttattcgggaggttgaggtaggagaattgtttgaaattagaaggtagaggttgtagtgagtttagattgtattattgtattttagtttgggcgaaaagagttaaattttattttaaaaaataaataaaaaaataaaataaaaaaaaatatggtagtttttgaaagtttgtttgggagaaggtgcgatgatggttgtataatttcgtgtaagatgttggtttatataggggttgttttttgttttttttcgtttttttaattttttatataataggtttgtgtgttatgtatatttattgagtttaagtaggtgtaaggtattgtgatttaatattttggttagtaagataataagatagattattgttttgtttttaggaagtgtatatgttattagaggaaatagataaaataaataaggaaaagtattagataatgtaagtgttatgagaatgtaaatgaggtgatgtgaattaaaataggatgatttaagtttgtacggaaggtttttatttttatgtttttggttagttaaggaattattagttgattagtagagaagggtagttcgtttagttagagtttttggggaagagggagtggttgttaagagatgagattaaagaagtcgagacgggtttttcgtgagggggggttgtaatgtagggttgaggagtgttcgaagagaatgggtaggtgagcggtgagatagttgtttttttagaagttttgtagtgaaaggaattaaagaaatggagtcgtgtattaggtggggaagggtgggggttaagggggtgtttttttttatatagagattgtaggttgagaatgattatatttttgttaataggaggtgggagtagggtacggtagtttatatttgtaattttggtattttaggaggcggaggcgggtcgattatttgaagtaaggagttcgagattagtttggttaatatgtaaagttttgtttttattaaaaatataaaaattagttgggtgtggtggtattcgtttgtaattttagttattcgggagattgaggtaggagaatggtttgaattcggaaggtagaggttgtagtgagttgagattatgttattgtgttttagtttaggtgatagagagagattttattttaaaaaaaaaaaaaaatataggaagggagttgggaatagggtgtatatttaggaagttttggggatttagtggtgggaaggttggaagtttttttttgattgttttttttttaaagaagtgtatggttggtgtggggtggggtaggagtgtttgggttgtggtgaaatattggaagagagaatgtgaagtagttattttttttttgttttataggaagtcgagttgttttagatattggtatggtgttgggggagggggttttttttttgtaggtttaggtgatttagggttggaagtgttttatgttggatttttatttttttttttgtagt

SEQ ID NO: 221 - DNA, 15863 bp, Artificial Sequence
  chemically treated genomic DNA (Homo sapiens)
gttgtaagaggaaaagtggggatttagtatgagatatttttaattttgggttatttgggtttgtagagaaggaatttttttttttaatattatgttagtgtttgagatagttcggttttttgtggagtaggaaaagaatggttgttttatatttttttttttaatgttttattataatttaagtatttttgttttattttatattagttatgtatttttttgaggaaaagataattagagagggatttttaatttttttattattaaatttttaagattttttaaatgtgtattttatttttaattttttttttgtatttttttttttttttgagatggagtttttttttgttatttaggttggagtatagtggtatgattttagtttattgtaatttttatttttcgggtttaagttatttttttgttttagtttttcgagtagttgggattataggcgagtattattatatttagttaatttttgtatttttagtagagatagggttttgtatgttggttaggttggtttcgaattttttattttaggtgatcggttcgttttcgttttttaaagtgttaagattataggtgtgagttatcgtgttttgtttttattttttgttaataaggatatagttatttttagtttgtaatttttgtatggggaaggatatttttttggtttttatttttttttatttgatatacggttttatttttttgattttttttattgtaaagtttttggaagaataattgttttatcgtttatttgtttatttttttcggatattttttagttttgtattataatttttttttacgaagggttcgtttcggtttttttaattttattttttaataattatttttttttttttaaaagttttagttagacgggttgtttttttttgttaattaattggtggttttttggttagttaggaatatgggggtaggggtttttcgtgtagatttaagttattttattttaatttatattattttatttgtatttttatagtatttatattgtttgatatttttttttgtttattttatttgttttttttaatagtatatatattttttaagggtagggtagtgatttattttgttgttttgttgattaaagtattagattataatgttttgtatttgtttgggtttaataaatgtgtataatatataagtttgttatatgagaggttaagagagcgagaaagagtaaggggtagtttttgtgtggattagtattttgtacgaagttatgtaattattatcgtatttttttttagataagtttttaaaggttgttatgtttttttttgttttgtttttttgtttgttttttgagatggagtttggtttttttcgtttaggttggagtgtagtggtgtagtttaggtttattgtaatttttgttttttggttttaagtaatttttttgttttagtttttcgagtagttgggattataggtttttattattttgtttgttgattttttgtatttttagtagagatagggttttattatgttggttaggttggtgtggaatttttgattttgtgatttatttgtttcggttttttaaagcgttgggattataggtgtgagttattgtgtttggttcgttatgttttttttttttttttttttttttttgaggtagggttttgttttgaagtttaagttagggtatagtggtgtaattatggtttattatagtttgttatttttgggtttagtgatttttttgttttagttttttaagtagttgggattatagaggtttgtttggttaattttttagtttttttttttttttttttttttttggagacggagtttcgttttgttatttaggttagagtgtagtggtgtgatttcgatttattgtaatttttattttttagtattaagcgatttttttgttttaattttttgagtagttgggattataggcgtttattaatgcgtttgattaattttttgtatttttagtagagatggggttttgttatgttggttaggttggtttcgaatttttgattttaggtgattttttcgttttcgatttttaaagtgttgggattataggtgtgagttattgtattcggttaatttttgagtttttttgtagaggtagggttttattatgttgtttaggtaggatgtttttttttttttttttttttttttttttagggatgttttttttttttatgttaaatttgttattagatttgttaagaaatatgtttattgtaagtgtttgttatatttttttgtttttttttttttttgagatagagttttgttttcgtttaggttggagtgtaatggtgcgatttcggtttatcgtaatttttgttttttaggtttaagcgatttttttgttttagtttttcgagtagttgggattataggtatcggttattgcgttcggttaattttgtatttttagtagagacggggtttttttatattggttaggttggttttgaatttttaattttaggtgattcgttcgttttggttttttaaagtgttgggattataggtatgaattattgtgtttagtttatttttttgttgtttgtattgataaaatattttttattaaatagtttttttaatggtaggtttttttttttttttattttattttattttattttattttattttattttattttgagacggagttttagtttttattgtttaggttggagtatagtggtattattttcgtttattgtaattttttttcggatttaaatgatttttttgttttagtttgttgagtagttaggattataagtatgtgttattatatttggttaattttgtatttttagtagagacggggttttattatgttagttaggttggttttgaattttcgattttaggtgatttattttttttggttttttaaagtgttgggattataggcgtgagtttttaagtttcgtttatttagtattttatgtattatgggaaatgtagagttgaggaaagtgttgggtatatagtaagagtttaataaaggttagttttttttgtaattgttttattttatttgttttatattattattttagagagaattgtgtgattgttagtgcggattagtggtattgtttttatttttatttttaaaatgtaattatattttttttagggatttatttagttaataggttaggaggtgttgttttgaaatggggggtttaaagttttaattttatttggagggatataggtttatagataggtttttttgtttttattttttaaatttttagtagtaattaaaattttcgtgttttttagagtaggatttttttaggggtattagtattagtgggttaggatataaatgtgttaggttgaattaggttttttaaatggttagggagttaagagaaatgtaggtgtttttggttgggtgggaaggtaatgagattaattgagattttaaataggggtaggtttgattagaattttaatagtggttgttggtattagttttgaaggtttatttgtttagtgattttttaaataatatagtataagtatttatatatatatttgtatgtatattagtatttttattgtatgggggtaatgtaagtaatttagataatttaaattatatgggaggatatgtgtaggttaaatattatttcgttttatatatgggatttagatatttgtgggtttggtgtgtgaggagttttagaattaagtttttatagatagagggataattatattgttttgtaatttgtaattttgttatatttatttattagttttggtagttttttatggattttttattaggatttttttttttttttgagatagagttttattttttttttttttttgagacggaatttcgttttgttgttcggcgtggtgtgtaatggtatgattttagtttattgtaatttttattttttgggtttaagtaatttttttgttttagttttttaagtagttgggattataggcgtttattattatatttagttaatttttgtatttttagtagagacggggttttattatgttaggttggttttaaatttttgattttaggtgatcggtttggtttagtttttcgaagtgttgggattataggcgtaagattatattttgtcggagttttatttttgttgtttaggttggagtgtaatagcgcgatttcggtttattgtaatttttgttttttaggtttaagtaatttttttgttttagttttttgagtagttgggattagaggtgtttttattacgtttggttgattttttgtatttttattagagttggggttttattatgttggttagttggttttagggaagttatttgttttagttttttaaaagtgttaggattatagtatgagttattacgtttggttttattaggattatggtatgtatagaattatattggttgtgaatgtgtttgatttttttttttttaatcgttattttttttttttttttttttttttttttttttgatatggaattttgtttttttcgtttaggttggagtgtaatgggataatttcggtttattgtaatttttgttttcggggtttaagtgatttttttgtttttgttttttgagtagttgggattataggcgtttattattatttttggttaatttttttttttttgagacggagtttttgtttttgttatttaggttggagtgtaatggtgtaatttcggtttattataattttcgttttttaggtttaagcgatttttttgtttaagttttttaagtagttgggattataggcgttcgttattacgttcggttaattttgtatttttagtagagatggggttttattatgttggttaggttggtgttgaatttttgattttaggtgatttatttatttcggttttttaaagtgttggggttataggtatgagttattgtattcggttaacgtttggttatttttttaatattttaatagagacgaggttttattatttttgttaggttggtttttaattttagattttaggtgatttgtttatttcggttttttaaagtgttgggattattggcgtgagatatcgggttattaattattatttttttttttttttttttttttgagatatagttttgttttgtcgtttaggttggagtgtagtggttcgattttagtttattgtaagtttcgttttttgagtttacgttatttttttgttttagtttttcgagtagttgggattataggcgttcgttattacgttcggttaattttttgtatatttagtagagatagggttttatcgtgttagttaggatggttcgattttttgatttcgtgatttattcgtttcggttttttaaagtgttgggattataggtttgagttatcgtattcggtttttattattttttttttttgtttggttaaaatttttagtatggtattaacgttgtgagagttaaatttttttttagtttttgattttagaggaaaaagcgttgagttttttttttttttttttttttttttttttttgagacgaagttttattttgttatttaggttggagtgtagtggtacgatttaggttttgtaagtttcgtttttcgggtttacgttattttttcgttttagtttttcgagtagttggtattataggcgttcgttattatgttcggttaattttttgtttttgtatttttagtagagacggggttttagtatgttagttaggatagtttcgattttttgatttcgtgattcgttcgtttaggttttttaaagcgttggtattataggcgtgagttatcgtttttagtagtattgagttttttattattatgtatgttgttagtggaatttcgattgtggacgttttgttattaaattagttaagttttttttttttagtttgttaggaggttggttggtttgtaattatgtatatgtgttgatattattaattgtttttgttatatttgttgaaatgattatagggtttttatgtttttttttgttaatgtggtgaattatatagattgatttttttttttttagtaaagattagtttgattatgttgtttaggttggttttgaaattttgggtttaagagatttttttgttttagttttttaaaatgttgggattataggtttgagttattgtattaggttaatttttgaatgttgaattagttataattatgagataaatattatttggttagaatgtatttattttttttttttttttttttttgagatggagttttattttgttgtttaggttggagtgtaatggtgtgattttagtttagtgtaatttttgttttttgggtttaagcgatttttttgttttagattttcgagtagttgggattttaggtgtttattattatgtttagttaattttttttttttttgagatgaagttttgttttgtcgtttaggttggagtgtagtggtacgattttggtttattgtaatttttgtttttcgggtttaagtaattttgttttagttttttgagtagttgggattataggtaggtgttattatatcggttgattttcgtatttttagtagagatggcgttttattatattggttaggttggttttgaatttttgatttcgtgatttgtttatttcggttttttaaagtgttgggattataggcgtgagttatcgtgtttagtttgatttttgtatttttattagaaacggggttttattatgttggttaggttggttttaaatttttgattttaagtgatttgtttgttttagttttttaaagtgttgggattataggcgtgagttatcgcgattggtttatttatttttttttttatattattaggtttggtttgttaaaattggttagttgttgtatgtttatgttaataggaatattggtttatattttttttttttataatgtttttgtttggttttggtattaggattattttggtttcgaaaataagttgggaaatatttttttattttttttttttttttttttttttttgagatagggttttattttgttgtttaggttggagtgtagtggcgtaatttcggtttattgtaattttcgttttttaggtttaagggatttttgtgttttagttttttgagtaattggtattataggtatggtgtacgtttagttatttttgtattttagtagagatggggtttcgtcgtgttggttaggttggtttcgaattttcgattttaaatgattttttgttttagcgtattaaagtgttgagattataggtatgagttatcgcgtttagtttgtttttttgttttttgaagagtttgtgtaagatgggtattgtttttttttttaacgtttaaagagagtagagaatagaggagataaatagaaaatagtattaagaggttaggtatggtggtttatatttgtaattttagtattttgggaggtcgagatgggatgaaagtttgaggttagtagtttgagattagtttgggtaatatagtgagattttgttaatataaaaaaataaaatagttagttgggtgtggtggagtaattttagttattcgtgaggttgttagaggattgtttgagtttaggggttcgaggttgtagtaagttttgattgtgttattgtattttagtttgggtaatagtgtgagtttttgttttaaaaattaataaagaaaaaaagaaaatagtattaaaatggtagttttatattttaattgtaaaataattaaaattaaaagtatttagtagagaaaggaagtttattttaataagtggagatagaataattggatttttatataggaaagatattagagattgatttttatattttatattataaataattaattttaagaattaattaatggtttaaggattttattgtaaaatttattattataaaggttttaaaagaaaatgtaagattatatttttatgattttggggttaaaaaaaaaaaaaaagatgttttaaataggataaggtaaatattgaatataaaaaagattaatttattttttttaagattttgtaaattttgtaaagtaaataaataggttcgtaatagattagaagaaaatatttacgatttatggatttgataaggatttgtatttagaaagtataaagtagttttataattgaataataaaaataaataaaaaaattaaaataataggtaaaagattcgaagagttattttataaataaaatacgaatggttaataggtatatgaaaaaatgttgaatatttttagttaatagagaattgtaaattataattataaggatatattatattagaaagattgatatatttaatgttcggaaggttgtggtataattataataatttttatattttgttagttggagtgtaaaatggtataatcgttttggaaaatttagagtttttgaaaaagtttaaaatatagttattttttattttttttataattttttttttaagtatttttttaagaaatacgaaaatatatgattataaaaagaattgtataagaatgtttatagtagttttattttataatcgtaaatgggaaataatttaaaaggttattaaaaggacggatatataatcgatggattatattaaatgaaaaggagtaaaatattgatatatataatatgaacgaatgttagatagtatattgaaggatagaagttcgataaaaatgagtatataatgtatgattttttttttttttttgagacggagtttcgtttttgtcgtttaggttggagtgtagtggtacgattttggtttattgtaatttttgtttttcgggtttaagcgatttttttgttttattttttcgaatagttgggattataggtatttattacgtttagttaatttttgtattttttagtagagacggggatttattacgttggttacgttggtttggaatttttatttttaagtaattcgttcgtttcggttttttaaagtgtaggcgtgagttaaagtgtaggcgtgagttatagcgtttattttgattttattttatatgaagttttttaataggtaaaatggttatggagattaaaataaaggtggggtcgggaatcgattgggaagagacgtgatgaaacgtttttgggacgatgaaaagggtttgtgatttggtaggtattacggagcggttaggggttaaaatttatttttttgtgtatttgttgtgtgtattggcgttgtgtgtaaatgttatttcgatttaggaaaaagatgacgtaagtacggtataaagtggtcggtacgcggtaggtgtatgggaagaaattgcggaatgaaataatcgcgagttaagagatggggtagcgggagaaatgaattcgagtttcgttttttattaggaagaatcggttcgggtcgagggttgtacggaggattatacggacgtttgcgggttcgtttttttcgttttacgacgtttagtttgcgtttggaattggaatggtttagtttaaagttagataataggtagattgtttttttcgataaattattaaacgatttattattgtatttttttaaaattttatttttagacgtattattttttttttttttttttcgggaagatgagatatgtttatttttgaaagtgttttcgggtttgttttttgtatatttttttttttttttgtttacgttatggtagcgttcgtttaggttgtaggcgattcggggggtggggtatattatttaaagaaggggagggattgaggtttgtattaaaataaatatttttgtttttgtaaaggttataattaagtaatttagaaaaagaaatgtaggcggagaatagtagtttttttttgttaagtaagaggaatcggtttaaaggatatttttttttttttttttttttttttatcgggtgaatagtgagttgtttcggtaaaaagaaatcggaaatgttgttgtaagaggtagaaatgtaaatgtggagttaaataataatagggttgtcgggttttttagattgcgacggtttttttcggtttggcgggtaaatttttggtttagtattttttatttttacgattgatagtttttaattggattttttttatttagcggagtcgggggttgtttggaaagatcgttttaggaaggataaaggttcggaagttgtgggattttagtagtttgggtttttcggattatttttaaatgattatttcggaatggagttttagtttttattaggatgttatgggttttaaaatatatagttatgagtttttaatgtttcgagatttaaaagttttagattttaatgttttgtgtattttttattttagggattttttacgtttagtatcgggtggatgtgtaaagaagtacgttttaggtcggtttaaggttttttaaagttttatttttttgtttaggcgtttaattttgagttcggatggttttaatatttttattatttatatttaggttttttaataatgtaatttttatgatgatttttttagttaagtttttattttatttatttttaaattcgttaagtttttattgttttatttttagttttagcgattttttcgagttgaaaatatacggagtcgagagttcgtgatttagagaggatttattaagtttagttaggagtttatttaatttagggaagcgtgttatcgtcgtggaaagtacgtttttagttcgaacgtaaagtgttttcggagtttagtagttatttgttttttggacggtggttttagatttttgagaagtttaaaatttttagcgttagttttgagtatatgggaggggaaaattttaattttattaatttttgcgaggtttttggtataaagttggatagtcgttatgataagtaagggtaagtaattcgtttgtcggaggaagtaaaggaaatggagttggggaggagggtgtagagttaggattttcgtcgatttggtgtcgtagatattaatattttggggtggaaaattttgtaagttagagttgtgagggtagaattggtggaaattattttggaggaattttgtattgtgttaaatatgaagggtggaaggaagaaagtttttgcgtttgtttttagttggattttttttttttattagttaaaatgttattttttaggaaggtttttcgtaatattatattttaacgtttttttttagatattttatattatattattttatttaattttttttataatttttattattttgataagatttatttgtttattgtttttagtatatggaaacgtaagttttatgaggatatagaatttttttattattttatttattgttgtatttttgagtgtttatattagtgttgggtagtaagtaagagttcgataataaatattttttgaatgagggagataggtttgaagtttggagaatgagatgtagaagaggtgtaagatttgttgcgttttttgtaggcggcgggggggcggtgtaggtgttttaagaattatcgcgggattcggtagggggagcgtaggcgtttttcgttaagatagaagcgtttagattataatttttagtagttacgaggagttttagggtttgatgggaacgggaaattttttaattttttacgtttcggtttcgcgggtttcgtgggtcgttcgcgaaatttgattcgggatgcggcggtttaatcggaaggtggatcgaaatttcgcgatagtaagaggttcgtagcgattcgcggtgttaaggaatatagtgtttttaaaagaattggcgttcgttgttcgttttttttttcgggagttttttgtttatttttagaagaggagggaagtataggtgggtttttttagttttgcgtcggatttttgagaatttcgaagttattttggttgaggttaattttcgttgtgttttttttgtagtatgaagattttggagatttaatcgttagtttcggattgttgttttttagattaggatttagttttagtttatttttttttttacgttttttcgatgaataaaaatgcggattttgaattgatgttatcgtttttcgaaaggggggattcgtttcggttgtttttagattttgtggttggtttagttgtgttttaggagttacgggagggggatttagtttttttttttatttttttggaaatagagtttggtttttttagtgagttgagttttcgaatcgaggagtaagaattttttgaaaatataagtttttttgtagaagaagtaaacgggagtttttttgaagaagaagcgaacgggttagagttggggtttggaaaagttatggaagatatttttggggaattcgttgtagaggacgagggagatacgtaagtggtgatggtagtggagtgtggagtttggggagatgaagtgtgaggtcgatttgttttttggttttgagatttatttttttaggtttttgttttttttgtttggcgatttaggtttattgttttttattttttttttagcgtttggaattatagttttttttagttgtttcgattttttagtggtttttggttagagtttagtatttaatttgagaattttttgaaaggttgtaagtggtaaggataataacggggtagggagttgattattttcgagatttttattgtaaaatagtttagttttttaggagagggatgttttagagttgggagaagcggtacgtagtttttttagattgagtttatattttatttagtagtttgtgttttttattttttttaaggatttaggggggtttatttattttagaggtaggtttagttttagttttatatttgaaaagtataggtttggttagttttttaatttttttttgtttttagggtttttgacggtttttgtattttgattaatagtgttgataatattttgcgaatttataatttgtttttagagttgtattatgagggggagtaggtggaatatgtagaaatggtaaggattggggttaattgtttttttattaatgttgtatatttaagtttttcgtggagatggaaaaagtgtagtttaagtgttttttgtttataaacgggattgttttttaagacgagtttttatatgtagcgttttttgtttcgaattttgaagttatttagagagaggttttttttttttttaattaggaatttgtgttttttgttaaaaagtagtgaattttttgtggtagtatatatatatttttattttttatttttttgagataaggttttgttttgttatttaggttggagtgttgtggtgtgatttcggtttattgtaatttttgtttttcgggtttaagcgatttttttgttttagttttataagtagttggtattataggcgtacgttattatattcgattaatttttatagttttagtagagacggggtttcgttatgttgggtaggttgatattaaatttttgattttagaggattcgtttattttggttttttaaagtgcggggattataggtgtgagttatcgtgtttggtttatagttatttattgattgattattgatatatgttagttattgtgttgggataaagtggtggataagatagatgaagggttggtttgttttttgtgtgggagatagataataaatatgtaaattagtaagtattaggattaagatgatgataaatgttttgaaggaaatatatagaatgaagagagattaattagaggaaagtatattgtataaaatggttaggaaggagttttttgaaaaggaggtatttgagttaagatttgaaggaggataagggattagttatgtgaaggtttttggaaagagttttttaggaattggtaatgatattataaatatttagaattgggaaatagttttgtgcgttaaaagattagaaaggttttgtatggtggtttacgtttgtaattttagttatttaggaggtcgaggtgtgtagattatttgaggttaggagttcgagattagtttggttaatatggtaaaattttatcgttattaaaaatattaaaattagacgtatgtggtggtacgcgtttgtaattttagttatttgtgtggttgaggtaggagaattttttaaatttaggaggtggaggttgtagttagataaaattgtattattgtattttagtttgggcgatagagtgagattttattttaaaaaataataaaatagattgggtttagtggtttatatttgtaattttagtattttgggaggttgaggtgggtagattatttgaggttaagagtttgagattagtttggttaatatggtaaaattttatttttataaaaatataaaaattagttgggtgtgatggtgggtgtttgtaattttagttatttgagaggttgaagtagaagaattatttgaatttaggagatggaggttgtagtgagttaagattatgttattgtattttagtttgggtgatagagtgagattttattttaaaataaataaataaataaataaataaataaataaatataaaataaaaaatttagaatgttggtatagttagattgaggtaagtgagggggatagaggggtgaggatagagaagagtagttacgtcgtgttggtttttatgggtaaggtatttggagtttatttgggaagttatgagagaggtgttttttttttttttttgagatagagtttcgttttgttatttagttggagtgtagtggcgttattttagtttattgtaagttttgtttttcgggattacgttatttttttgttttagtttttttcgagtagttgggattataggcgttcgttattacgtttggttaattttttgtatttttagtagagacggggttttattatggtttcgattttttgatttcgtgatttttttgtttcggttttttaaagtgttgggattataagtatgagtttcgcgtttagttttttttgggttattttttaaattcgttttattgtattttttagtagtatgagttattgtttttatttttttgcgttggagtatttaggtatttagggttttgttgggttttttttttttttattagtatttttttttttttgtattgttttttgagacggtgataacgattgttaaatttttaattttcgagagtggtttatcgaggtcgtgattatgatattaatgattatagtattaggatattttaaaagatatattttgtaatatagatagttaatttgtgttttttttggttttttttggggggggggggttttgagatagagtttcgttttgtggtttaggttggagagtagtggtgtgattttgttttattgtaatttttgtgtttcggtttaagcgattttgttgttttagttttttgagtagttgggattataggtacgtattatcgtattcggttaattggggtatttggagtagagatggggtttcgttaagttggttaggttggttttaaattttcgattttaagtgatttatttatttgcgttttttaaagtgttgggattataggcgtgagtattgtttttggttagtgagtttgtgtttaaaagatttttgtggttggtgtggtggtttatgtttataattttagtattttgggagattaaggtgggaggatgtttgagtttaggagtttgagattagttttggtaatatagttagattttgtttttattaaaaaagttgggtttatggttttagttatttgggaggttgaggtgggaggatcgtttgagtttgcgaggttgaggtt

SEQ ID NO: 222 - DNA, 6077 bp, Artificial Sequence
  chemically treated genomic DNA (Homo sapiens)
aaaatatgagaaagtaagtatttgatattttttattttaaaagaggggggttttcggaatgttattgttttggtttttagtgattgtggtttttttttttgttagaggttttatgtttagattattagtgatatttttagtttttaaagattagtttagtttatataagggtaatgttgaaatatataagttaggttttaatattgttatattttattgtaaagtataaaagtatgttttaattcgttatttaaagttttaagatatttttaagtttttttttatttgtatgttaaaaattaaatttaaatgggaagtagtattgggagaaagtttttttgtgaattaataattaaaattttttgttagttttataaatatttttggataatttttttaaatttataaagggtaagaattgaggttttatagatgataacgaaaatggtaaggaatgtattaatttttttatgtagtgtcgaatttagagttaaaataatagaagattaaaagataggtttttatttttgtatatataaagatgtttcgtaaatgtttatttatttttattaatttatttttaatacgaaacgggaaatgtttaagtgttagtattatttttttaaagatagtttttttttgtttatatttgtttattatgtttttatttaagtaaataattttaagtaaaaataacgtttgagtatttatttgttgaatgtatattttattatagttttaagattaagaattgatgtttaaatattaattgtttcgttagttttatttattaaggttaaagtagtttgtgttttatgaatcgatattaaaaaagaaagttacgttagtttttcgtgggagaaaagagagataggcgggtgacggtagattggaataaggagttattatagtatttatttttttatattgtagttttgaaaattgtgattagttatagtgaattttttatgaaatggaatatttttattaatattttgaggaattatataaattttattgtaagatatgaaaattagaaatatggatttgttttttttagtttttagggtttttaagaagatgattttagtaatagattattattaagtgttttagggtattttgattagagtgtataagttggaaaaaaatatttaagttaagtaagtagatgtaatttttttttttataatttattgaaatttttataaatggtaaaaataaaaaataaattttttatttaattgaggaggggggtatattgaaaatatattaaggttgagatgttatttaaattaatgaggttttttgttttgtagttgatgttattttatgtgatttggaataaaatttttttgaagaggtaaaaaacgtaatttgagagttaaatttttaaaagttagatagagtataggaatgttaggagtggtaaaatttgaaaaagtattatgatatattagttagttagtataggtggtggataaggaaaacgaagtttattttttacgaggtatgtttttttttagtggttttttaatgttaattgttttttttttttgaggatatatatattaggtattcgggttattttttttttttgaggatatatattattaggtatttaggtatatatattatatgttttgaagtttaaagttatagttttgtgatttaagtatttttttgttatttatggaacgaagattttaaattttagttatgaggataattatttttttatttggggatagaatattagtatttaaattatttattcggtatgtggtagaggagaagagaattagaggagaagtagagatgataaagtagttatattatttattagtttataggtaatagaattattaatttgttttttgtgataaagtaataataaagagtcgatattttttatatttttatttgtgtgtagtcggtattgtcgatatttatttttttaagggtatttttttagattttttatttgtttacggtatttttttgggtttcgtatttgttcgggtatttgtcggggttttgtatttgttcggtttttatatttgtttggggtatttgtttgggtttcgtatttgtttggggtatttgtttgggtttcgtatttgtttggggtattttttcgggttttttatttgtttagggtatttttttgggtttcgtatttgtttggggtatttgtttagatattgtatttgtttcgggtatttgttcgggtttcgtatttgttcgggtatcgtatttgtaggatttttaagttgtttttatttacgcggtcgttttcggttttgttcgtcggggacgttggtatcgaggatgttttgttcgtggtttaggttttcgtcgtttattaggtatttgtcgttcggggagaatttgtagagtaagttggagagtttgaatatttcggagaagtttatggtcgtcgtttgtcgcgggcgttattttgcgttcgaaaattcgcgggatttttgggcgcgtagtaggttgtaatagtcgacgtcggttttcgaggtcggaagttagaaggcggaagtgaattgtagtttattagcgtcgtcggttttcgcgcggtattgtggggtttgtagtttttgtgtcgtagggttttaaaggaaacgtttacgtttttttcgattagggattttcgattcgagaattttattttaaaggtcgggaggtttttgagtatttttagttagggttgttgataaaaatgtagaaagtatagtaaaatttgaattttagatttataataaatttagttataagtatgtttttaaatattgtacgggatatgttaatacggaaaaattattcgttagtttgaaatttaaatttaattgagcgatttgtgtgtttgcgtgtgtgtatatatgtatatatatatatttatatttatatgtaaatgtatgtttatatgtaaatatatgtttatttataaatatatttttaataagtaatacggtgtttgtcgtatatatattatatcgtgtatgtaatgtataagtatttatttcgtttgtttggggttttgtttgtttttgttgagttcgatttttttatttgtcgtttggtttttgttttacgttttagtgttattgagattaaggagagaacgaatttgtcgttgattgggtagagcgagcgcgtggatcgcggttatcgttcgtttattattcgcgcgtatttgggttggtatcgggcgaagaatcgtgcgggtttgggatttgggggtttagagggagcgagtttttgcgcgggcgttcggttcgtaggtttcgtaggtttaggggcgtgtttcgtttttatttttatttcggatttcggtttttttttttagatagcggttttttttatttttggttttcgtaggtcgttagtagttcgcgttaggtttcgtcggcgtttttagggttttttagatcgcgtagattttgatattttcgtttggttttgggttttgggagttgagagtcggttagggttttgttcgtattttcgggcgtttagtttcgggtttgtttttcgcggacgttttaattttttcggtcgaatggatggtggtgcgcgcgcgttttatttcggcggtgtcggttttttttgttgttaaaattagatttaaatttttgtatgggattcgtttttgggtttttatttcgtgcgtttagtaaatagtgggtgagttatgaagatgtgcgagttagtcggatttttttcgttaggcgcggattcgttgcggttagagaatttagtttgcgttagttcggttcgttcgcgaagttacgggttttattgacgcgattttttaagacgtgggggttattatgggtagaggatatcggttcggagttagattacgggttttataagtattagattataagtagcgtcgttattgagagtcgttcggaattcgtttagtatgtcgggttttttagttagggtttggtgtacgtggtcgagggttttggaagtttcgatggtttaggaggagtaggcgggcggggcggcgggtgtcgttggtcggtagagagtttcggtttgatttagcgtaggtttggtgcgcgtagagaataattttaagcgtatcgacgttcgcgagttttttttaaatatcgaacgggatttagagttcgagtttataggcggcggtcgggggagggagtagggtgttggtcgtcgttcgggagtgttcgcgttttgggtgatttttggaaggacgtggggtttaaatttcggttggggttgggagagtagtttttagaggtttttcgcgggattttttgtcgggcgggatcgtggttttataggagaagtgggtggtaagttttgtttggcggaaagtagtcgtttttttttttttgggtttggggcggcgttttttatttttgtttttcgttttttatttttgtttttcgtcggttatattttttgttttttggattttaagcgtttcgcgcgtcgaggagtttagcgttagtggcggcggttaggagagattcgggtgttaggaaagatgggtcgtttgggggatagtagggagttcgggggaaacgtaggcgtcgggtatagagtcggtatcggcgtttttagttttgtcgaagatcgcggtcgggtttggttcgcgggaggggttttggcgtcggatttgtttcggttttgcgtgggcggtttcgtcgggttttgtaggagcgacgcgcgttaaaaggcggcgggaaggaggcggggtagagcgcgttcgggatttcgatttggacgcggttagttggagaggcggagcgtcgggaggagattttggtttcgtcgcgattcggtggttcgcgttgttttttcgcgcgtcgggttaaaaaggcgttaacgttcgcggtcgtttatttttcgcggcgtttttttttttcgcgtttatataattcgtttaggggtcgggtagttcgttttgttttttcgttcgcgtattcgttcggaggttcgcgcgttcgcgaaggggacgtagcgaaatcggggttcgcgttaggttagtcgggacggacgtcgatgttcggggttgcgacggttgtaggtaggaggtttagggtcggggggcggttcggtttcgcgggcgggggttggagcgtagcgttgggtaggtatttgggttcgtagtttcgaagttgggaggtgaggggagagcgatcggggacgagttgggataaggcgatataggggttttttcggagttggatcggtttttgggatttggcgttcgcgagaggttggagcggttagagtttagtttgcgaggagacgcgggttttgtttttagcgtcggtcgtttttggcgttaaagatagtttcgtaggggtttcgggagggttttttttttgttgttttttttttatttcgggtttcgagggtcgttgggagggtaatttcgggaagaggtcggggtgcggggcgcgggtgtaggtggaaatcgttagtaagttttttttcgttcgcgcgtttttttcgatttgtagggttgtgttaatttcgaggttttagtttttttgaggagttagggttaggtttttttttggatagggagaaggatttgggcgggggttttgatttatggagttggttattaagcggtttcgatggtttttcgagggatagttttttgtggttttgagtttgtttgtcgagggtttttggtttgttttcggagcggttttaggtagagaaagttcgtgaagaaatggttcgggtcggtttggagggagatattttacgtttttttagtttttgggtcgtttttttttgtagtttttgtttttttcggggtttggatttggggagcgatgattatttttgtttagtttgtattttggtttggacgttaggagataagtttatgtagtatgtatacgtttgttatataaataggggatagatagacgatttttaattagtaagggtgtagggaaaagtaatgtattttaaatttttgattagaggttatttgtttttaaagatgttgttatttgtttatttattgtttggatatttggaaatggtttaggtttattaatataatg

SEQ ID NO: 223 - DNA, 6077 bp, Artificial Sequence
  chemically treated genomic DNA (Homo sapiens)
tattgtgttaatgagtttgagttatttttaaatgtttagatagtgaataaatagatggtagtatttttggaagtaaatgatttttggttagaagtttggggtgtattgtttttttttgtatttttgttggttgaagatcgtttatttgttttttgtttatgtagtagacgtgtgtatattatatgggtttattttttagcgtttaggttaaaatataagttgagtaaaggtaattatcgttttttaagtttaagtttcgggaaaggtaggggttgtaggaggaggcggtttaggagttaagggggcgtgaggtgtttttttttaggtcggttcgggttatttttttacgggttttttttatttgggatcgtttcggagataggttaggagttttcgatagataaatttagagttatagggagttgtttttcgggaaattatcgaaatcgtttagtaattaattttatgggttaaggttttcgtttagatttttttttttgtttagaggggggtttggttttggttttttagggaagttgaggtttcgggattggtatagttttgtaggtcggagggagcgcgcgggcggggaggagtttgttggcgatttttatttgtattcgcgtttcgtatttcggttttttttcggggttatttttttaacggttttcggagttcggggtggagaggggatagtaggaggagggttttttcggaatttttgcggggttgtttttggcgttaaaggcggtcggcgttgagggtaggattcgcgttttttcgtaggttagattttggtcgttttagtttttcgcgagcgttaagttttaggggtcgatttaatttcgagggagtttttgtgtcgttttgttttagttcgttttcgatcgttttttttttattttttagtttcggagttgcgagtttaggtgtttgtttagcgttgcgttttagttttcgttcgcggagtcgaatcgtttttcggttttgggttttttatttgtagtcgtcgtagtttcgggtatcggcgttcgtttcggttggtttggcgcgggtttcggtttcgttgcgtttttttcgcgggcgcgcgagttttcgggcgggtgcgcgggcggggaggtagggcgggttgttcggtttttaggcgggttatatgggcgcggggaggggaggcgtcgcggggagtaggcggtcgcgggcgttagcgtttttttagttcggcgcgcgggaaggtagcgcgggttatcgagtcgcggcggggttaaggttttttttcggcgtttcgtttttttagttggtcgcgtttaagtcggggtttcgggcgcgttttgtttcgtttttttttcgtcgttttttggcgcgcgtcgtttttgtagagttcggcgaggtcgtttacgtagggtcgaagtaggttcggcgttagggtttttttcgcgggttagattcgatcgcgattttcggtagagttggggacgtcggtgtcgattttgtgttcgacgtttgcgtttttttcggattttttgttgttttttagacggtttattttttttgatattcgggttttttttggtcgtcgttattagcgttgggtttttcggcgcgcggggcgtttggaatttaaggggtaggggatgtggtcggcggggaataggggtgaggggcggggaataggggtgaggggcgtcgttttaggtttaggaggaggggaacggttgtttttcgttaagtagggtttgttatttattttttttgtggagttacggtttcgttcggtagaggatttcgcggagagtttttgggggttgtttttttaattttagtcggagtttgggttttacgtttttttaggggttatttaggacgcgaatattttcgggcggcggttagtattttgttttttttttcggtcgtcgtttgtgggttcgggttttggatttcgttcggtgtttggaaggagttcgcgggcgtcggtgcgtttggagttgttttttgcgcgtattagatttgcgttaggttaggtcgaagttttttatcggttagcgatattcgtcgtttcgttcgtttgttttttttaggttatcggggtttttagggttttcgattacgtatattaggttttggttaggggattcgatatgttgggcgagtttcgagcggtttttagtggcggcgttgtttatggtttgatgtttatggggttcgtgatttggtttcgaatcgatgttttttgtttatggtgatttttacgttttggaaagtcgcgttagtgaagttcgtggtttcgcgagcgagtcgggttggcgtagattgggttttttggtcgtagcgggttcgcgtttgacggggagggttcggttgattcgtatatttttatggtttatttattgtttgttgggcgtacggggtggggatttaaagacgaattttatgtagaggtttgggtttagttttggtaatagaaaaggtcggtatcgtcggagtaggacgcgcgcgtattattatttattcggtcggggaggttggggcgttcgcggggagtagattcgaggttgggcgttcggaggtacgagtaggattttggtcggtttttagtttttagaatttagggttaggcggggatgttagggtttgcgcgatttggggggttttagaggcgtcggcggggtttggcgcggattattagcggtttgcgggagttaggggtggagggggtcgttgtttagggaagaggatcggggttcggagtgggggtgagaacgaggtacgtttttgagtttgcgaaatttgcggatcgagcgttcgcgtaggagttcgttttttttgggtttttaggttttagattcgtacgatttttcgttcggtgttagtttagatgcgcgcgggtgatgaacgggcggtggtcgcgatttacgcgttcgttttgtttagttagcggtaaattcgttttttttttgattttagtggtattggagcgtgaggtaagggttaggcggtaggtagaggggtcggatttagtaaaagtaaataaaattttaagtaaacgaaataaatatttatatattatatatacgatataatatatgtgcgatagatatcgtattatttattaaagatatatttgtaggtaaatatatatttatatgtaaatatatatttatatataaatataaatatatatatatgtatgtgtatatatacgtagatatataggtcgtttaattaaatttgaattttagattagcgagtaattttttcgtattagtatgtttcgtgtaatatttgggaatatatttataattagatttgttgtgaatttgaaatttaaattttattgtgttttttatatttttattagtagttttagttggaggtgtttaaaggtttttcggtttttgaggtaaggttttcgggtcggaaatttttggtcggaagaaacgtgggcgttttttttaaagttttgcggtataagaattataagttttataatgtcgcgcggaagtcggcggcgttgataggttgtagtttattttcgttttttgattttcggtttcggaggtcggcgtcggttgttgtagtttgttgcgcgtttaggggtttcgcgggttttcgggcgtagggtggcgttcgcggtaggcggcggttatgaattttttcgaggtatttaagttttttagtttattttgtaagtttttttcggacggtaagtatttggtgagcggcggggatttgggttacgggtaggatattttcggtgttagcgttttcggcgggtagggtcgggggcggtcgcgtgggtggaggtagtttggggattttgtaggtgcggtgttcggataggtgcggggttcgggtaggtattcggggtaggtgtagtgtttgagtaagtgttttagataggtgcgggatttaggaagatattttagataggtggagggttcggggaggtgttttaagtaggtgcggggtttaggtaggtattttaagtaggtgcggggtttaggtaggtattttaagtagatatgggggtcggataggtgtaggatttcggtaggtgttcgggtaggtgcgggatttaggaagatatcgtagataggtggggggtttggggaggtgtttttggaaaggtgggtatcggtagtgtcgattgtatataggtgagggtataggagatgtcggttttttgttgttattttgttataaaaggtaaattgatgattttgttgtttgtaaattggtaagtggtgtggttattttgttatttttattttttttttaattttttttttttttattatatgtcgaataaatgatttaaatattagtattttatttttaggtaaggaagtagttgtttttatggttgggatttgaggttttcgttttatgggtggtagaagggtgtttaaattatagagttataattttaagttttaaaatatatagtgtatgtatttggatgtttagtagtgtatatttttagaagagagggataattcggatgtttagtatgtatgtttttagaagagggggataattggtattggaaagttattaagaagaaatatgtttcgtaaaaagtgggtttcgttttttttatttattatttgtattaattgattgatgtattatgatgtttttttaggttttgttatttttgatatttttgtgttttgtttagtttttgagagtttaatttttaaattacgttttttatttttttagggaggttttattttaaattatataaaatagtattagttataaaatagaaaattttattagtttaaatggtattttagttttggtatatttttaatgtgtttttttttttaattaaatgagaggtttgttttttgtttttattatttatgaaaattttagtgaattataaggagaaagattatatttgtttgtttaatttgggtgtttttttttagtttgtatattttggttaaaatattttgaaatatttggtaatgatttgttattggaattatttttttgaaagttttgaggattggggagagtaggtttatgtttttagtttttatattttgtagtagagtttatgtggttttttaaggtgttggtaaaaatattttattttataaggaatttattgtaattgattatagtttttaaagttatagtgtgagaaagtaagtgttgtggtagttttttgttttaatttgtcgttattcgtttgtttttttttttttttacggaaaattaacgtggtttttttttttgatatcggtttataaaatataaattattttgattttgataagtaaaattaacgaagtagttaatatttaaatattagtttttgattttgaaattgtagtaaaatatatatttagtaggtgagtatttaggcgttatttttatttgaaattgtttgtttggatagggatataatgaataaatatggataagaagaaattatttttaagaaaatagtattaatatttaaatatttttcgtttcgtgttaggaataggttaatggagataaatgagtatttgcgaagtatttttatgtgtgtagaagtgaaagtttgttttttgattttttgttgttttggttttgagttcggtattgtataagaagattgatgtattttttgttattttcgttgttatttgtgaagttttaatttttattttttataaatttgaggaaattgtttaaaagtgtttataaaattagtagaggattttggttattagtttatagaagagtttttttttaatgttattttttatttaagtttagtttttaatatatagataagaagggatttaaaaatgttttaaagttttaagtagcgagttaaaatatatttttatattttataatagagtatagtaatattaaaatttggtttgtatattttaatattatttttgtatgaattgaattgatttttaggggttggggatgttattggtgatttagatatgaaatttttggtaggagagaaggttatagttattgaaggttagggtagtagtatttcgaaggttttttttttttggagtggagaatgttaggtgtttgtttttttatatttt

SEQ ID NO: 224 - DNA, 2501 bp, Artificial Sequence
  chemically treated genomic DNA (Homo sapiens)
agttgggattataggtgtacgttattatgtttggttaatttttttattttttatagagataggatttcgttatgttgtttaggttggttttaatttttgaatttaagtgatttatttgttttgggtttttaaaatttcgggattataggcgtatagtgttaggtttttatatttttatatatttttttgtttttttagttgtgaaatggagataatgatatagttttaatttacgtgggatgtttagtatagtgtttggtatttgatagatttttttttttttatttgaaatttatttttgagttgggtacggtggtttatatttgtaattttagtatttgggaaaattaaggtaggtagattatttgaggtgaggagtttaagattagtttggtaaatatggtgaaatttcgtttttattaaaagtataaaaattatttgggtgtggtggtatatatttgtaattttagttattttagaggttgaggtacgataattatttgaattcggtagatggaggttgtagttgagttgagattgagttattgtattttagtttgggtgataaagcgagattgtttaaaaaaaaattatttttaatttaatataaaattttttgaatttttttttttttgagttgtttttttatttgagtttattttatattattgaatagttaattatagaattgtgtattattttttttgatttttagatttttagttttttatagtattttgtttttttttgtcgtattagttatagttgtattttttttttttttttttttgagatagagttttattttgttatttaggttgtagtgtagtagtataattttagtttattgtaattttcgtttttcgggtttaagtaatttttttgttttagttttttaagtagttgggattatatgcgcgtattattacgttaggttaatttttgtatttttagtagagacgaggttttattatgttgttaggttggtttagaatttttgattttgtgattagtttattttagttttttaaagtattgggattataggtatgagttattgtattcggttatagttgttattttatttgtgtgattgattatcgtatgacgtttttattgaagtgtagtgaaggtaggaaatatgatcggtttttataatatttttaatatttattattataggtggtatatagtagggttttaataaatatttgtaaaatgaataaagttaatgagtgtttatgtttgtagttttaattgttttgaagtaaatatttgattttttaatttttattagagtgttttgtatatagtaggtttaattatttttttttttttattaattatttatgttttgtaagaatttagttagttgattttttgtattttataagcgtgatgattgggtgttttcgtgtgagatgcgttattttcgaattttgttacgacgtcggtatattgcgcgtttgatatgaagaaaaaaaaaatttagttagtttattaggtatagtggttaaggtttgtaatttttgtattttgagaggttaaggtaggaggattatttgaatttaggagttcgagattagtttaggtaatatagcgagatttcgttttaaataataaataaaaataattagtcgggtatggtggtgcgcgtttatagtattaattattcgggaggttgaggcgagacgatcgtttgagttagggaggttaaggttgtagtgagttaagttcgcgttattgtattttagttcgggcgatagagtgagattttgttttaaaaaaaaaaaaaatattaaattttagaggggcgaaaaaaaattttatagtggaaatatagtaacgagttggtttagtttcgttttcgttataacggtttacggtgttggaggatttttttgcgtacgcgtatagttttcggtcggttattttcgcgagcgcgttttattttttatcgagcgcgcgcgaagattacggaggtcgattcgggagcgcgtacgtagtttcgtttcgcgttcgattcgcggatttcgcggcgttcggttcgggtggtttggatcgcggagggaatgtttcggagggcggagaattgggacgaggtcgaggtaggcgcggaggaggtaggcgtcgaagagtacggttttgaagaagacggcggggaggagtcgggcgtcgaggagttcggttcggaagagttcggttcggaggaattgggcgtcgaggaggagatggaggtcgggcggtcgcggttcgtgttgcgttcggtgaattcgcgcgagtttttttaggttattttttgtaatcgtagttcgcgcgtcgtgttgttcgtatggtttaatttcgacggcgagtcgtagttttatttaacgttgtcgtttggtacgggtcgtcgtatttatagttatcgaggtacgggttcggcgtttaggttcgatttagtagggacgatagtacggtttgaagtttttttatcgtttcggggtttattttgtagacgg

SEQ ID NO: 225 - DNA, 2501 bp, Artificial Sequence
  chemically treated genomic DNA (Homo sapiens)
tcgtttgtaaaatggatttcggggcggtagaggggttttagatcgtgttatcgtttttgttgggtcgggtttaagcgtcgggttcgtatttcggtagttgtggatgcggcggttcgtgttaggcggtagcgttgggtagggttgcggttcgtcgtcgaagttgagttatacgggtagtacgacgcgcggattgcgattgtagaagatgatttgggagggttcgcgcgagtttatcgagcgtagtacgggtcgcggtcgttcggtttttatttttttttcggcgtttagttttttcgggtcggattttttcgggtcggatttttcggcgttcgattttttttcgtcgttttttttagggtcgtatttttcgacgtttgtttttttcgcgtttatttcggtttcgttttagtttttcgtttttcggggtatttttttcgcgatttagattattcgggtcggacgtcgcgggattcgcgggtcggacgcggggcggagttgcgtgcgcgttttcgagtcgattttcgtagttttcgcgcgcgttcggtagaggatggaacgcgttcgcggaaatagtcggtcggaggttgtgcgcgtgcgtagaaggattttttagtatcgtaggtcgttgtaacggaggcgaggttaggttaattcgttattgtatttttattataaaattttttttcgtttttttaaggtttggtgttttttttttttttgagatagggttttattttgtcgttcgggttggagtgtagtggcgcgagtttggtttattgtagttttgatttttttggtttaagcgatcgtttcgttttagtttttcgagtagttggtattgtaggcgcgtattattatgttcgattaattatttttatttgttgtttgaaacggagtttcgttatgttgtttaggttggtttcgaatttttgggtttaagtgatttttttgttttggttttttaaagtgtagggattataggttttagttattgtgtttggtggattaattgaattttttttttttttatgttagacgcgtaatgtgtcgacgtcgtaataaggttcgagggtggcgtattttatacgggaatatttaattattacgtttataaagtataaaaagttaattaattgaatttttataaggtatgggtgattagtaaagagggaaaaataattagatttattatgtgtagagtattttggtggaaattggaaaattagatatttattttagagtaattaaaattataaatataaatatttattaattttgtttattttataaatatttattaaggttttattatgtattatttatggtgataagtgttgaaaatattgtaaaaatcggttatgttttttgtttttattgtattttaataaaagcgttatacggtaattaattatataaataaaatagtaattatggtcgggtgtagtggtttatgtttgtaattttagtattttgggaggttgaagtgggttgattataaggttaggagttttagattagtttgataatatggtgaaatttcgtttttattaaaaatataaaaattagtttggcgtggtggtgcgcgtatgtaattttagttatttaggaggttgaggtaggagaattgtttgaattcgggaggcggaggttgtagtgagttgagattgtgttattgtattgtagtttgggtgatagaatgagattttgttttaaaaaaaaaaaaaaaaaaagtgtaattgtgattagtacgataaaaagagatagggtattatagaaggttaaagatttgggggttaaggaagatggtatataattttgtgattaattgtttaatgatgtgggatggatttaagtggagaagtagtttagaaaaagaagggtttagagagttttatattaggttaaaaataatttttttttagatagtttcgttttattatttaggttggagtgtagtggtttagttttagtttagttgtaatttttatttgtcgagtttaagtgattatcgtgttttagtttttggagtagttgggattataggtgtgtgttattatatttaggtaatttttgtatttttagtagagacggggttttattatgtttgttaggttggttttgaattttttattttaggtaatttgtttgttttggtttttttaagtgttgggattataggtgtgagttatcgtgtttagtttaaaaataaattttaagtagaaagaaaaaaatttattaagtgttagatattgtgttaagtattttacgtgaattaaggttatgttattatttttattttatagttaaggaaatagaagggtatataagaatgtgaaggtttagtattatacgtttgtaatttcgagattttgggagtttaaggtaggtggattatttgagtttaggagttggaattagtttgggtaatatagcgaggttttgtttttataaaaaatgaaagaattagttaggtatagtggcgtgtatttgtagttttagtt

SEQ ID NO: 226 - DNA, 2401 bp, Artificial Sequence
  chemically treated genomic DNA (Homo sapiens)
ttattaaagaaaaaaaagatgatttattagatagttgttaaggtatttatataaaattatacgatagtaggatagatggtaattaagagggaatttaggattcgttattattagttggaaatatttgatttttagtttgtaaatgtgataagttagattaatattagtaggatattgaatatagtttgtagggatgagtttttgcgttatttttggatatgtgtttaagtaattagaataatttaaaatgttattaggtttttgttgttatttttataaatttcgaatagtgagttgggtttttaaggaatttgtttttgttagtttattttatgttgtataataaataggtttaaagtttttggtagcgtatattaagtatggaggattttttatttattacgatagttttttcgttggagggttggggttgtattttatttttttttttggaaggggcggtttttgtttgaggttttatttgttttatagtagagggatgaaacggtaggattttggttttgacgggttttatttggtaatggtatatgttaagtgggttacgttttattgtttagagtaagttatatggttacgtttgatattgacgtgcgggaaatgtagaatttttttgtatttggggaggtagatatttggataatatgtaatttattatagggttagttggatgaagaacggttaagggtttaggttttttatttcgagttaggtcgaattagtcggggtcgtgagattaagttacggttattagtgttcgtttggaattatgttttgtttttgtcgtgtttatattgtagtagggtttttgttttttaatttatttgaaattggtggtgggtgtggtatatagatgagaaataggaattttttacgttgggttttaataggagttgcggtgggaatataaatggtgtagttattttggaagatagtttggtggttttttataaaattaaatgtattttttatatatgattcgttatatattatttagtaattgtattttttggtatttgtttagatgagttaaaaatttgtatttatataaaaatttgtacgtggatgttgatagtagttttatttataattgtttaaatttggaagtttttaggaggtgagtgggtaaataaattgtggtgttttcggttagcggaatattatttagtgttaaaaagaaatgagtttaagttatggaaagatatgaaagaattttaagtattattaagttaaagaagttaatttgaaaaggttgatgttgtatgagtttatatttatgatattatagaaaaggtaaaattataaagatagtaaaaggattagtggttgtaggagttagggaggagggagggatgaataggtggggtatagaggatttttagggtagtgaaattattttgtatgatattgtaatggtggatataggatagtaagtatttgttttttatttcgtagaatgtacggtattgagaacggatttttttgtaatatatggatttttagttataatattgaatttttttcggggtttcgtatcgttcgtagcgttttttaattttcgttttcgtttcgtttatcgttttttttttttgttatagcgcgttcgtttcgcggtcgttaattagtcgcgcgtttcggtcgcgcgtttcgtttcgttttcggtgggtgtgcgcgcggttaatgggcggtgcgcgggggtcgggtcgcggcggggcggggtagcggggcggtcgttaatcgtcgtggtgttgttgaaattgaaaatattatattatgttaatcgcggtcgggttcgcgcgtacgggggtggggttcgcgcgtataaagggggcgtaggcgggttgggcgttttataggttaagtgcgttgtgttcgaggggtgtcggttaggtttgagcgagcgagttagttagtaggtatcgagggggcgcggttgtcgttcggacgagataggcgaattcgacgtagaagagtttattatcggatagttaggtagtcgtcgcgtttttcgtatacgtagagtcgggcggcgcggggttttttttgcgttcggttttcgttttttttttttttttttttttttttttttcgttgtttttttttttttcgttgttcgcgtttgcgtagtttcgggttatgttcgacgcgttttttcgtagtatatttacgatggagcgttttgtcgttcgtgggatttttttagtattagtgcgtattagcgtttgtcgtagttttttcgggtcggtggattacgaggagttgagtcgcgagttgtaggttcgtttggtcgagttgaacgtcgaggattagaatcgttgggattacgatttttagtaggatatgtcgttgcggggttttggacgtttgtagtggatcgaagtgg

SEQ ID NO: 227 - DNA, 2401 bp, Artificial Sequence
  chemically treated genomic DNA (Homo sapiens)
ttatttcggtttattgtaggcgtttagggtttcgtagcggtatgttttgttggaagtcgtaattttagcggttttggttttcggcgtttagttcggttaggcgggtttgtagttcgcggtttagtttttcgtggtttatcggttcgaagaggttgcggtaggcgttggtgcgtattagtattgggaaggttttacgggcgataagacgttttatcgtggatgtgttgcggagggacgcgtcggatatggttcggggttgcgtaaacgcgggtagcgagagaggagaggatagcgagaagaaggggaaaggagaggaggagagggcggaggtcgggcgtaagggagatttcgcgtcgttcgattttgcgtgtgcgagggacgcggcggttatttggttgttcggtggtggatttttttgcgtcgggttcgtttgtttcgttcggacggtagtcgcgttttttcgatgtttgttggttagttcgttcgtttaggtttggtcggtatttttcgagtatagcgtatttggtttgtggaacgtttagttcgtttgcgttttttttatacgcgcgggttttattttcgtgcgcgcgggttcggtcgcgattagtataatgtagtatttttagttttaataatattacggcgattggcggtcgtttcgttgtttcgtttcgtcgcggttcggttttcgcgtatcgtttattggtcgcgcgtatatttatcgggggcggggcggggcgcgcggtcggggcgcgcggttgattggcggtcgcggggcgagcgcgttgtagtaggggaagggggcggtgagcggggcgggggcgggagttaaagggcgttgcgggcggtacggaatttcgaaagggatttaatattataattgaaagtttatatgttataggagggttcgtttttagtgtcgtatattttacgggataaaggataaatgtttattgttttgtgtttattattatagtattatataaggtagttttattgttttaaaaattttttgtgttttatttatttattttttttttttttttagtttttgtaattattgatttttttattgtttttgtagttttgttttttttataatgttatagatgtgaatttatatagtattagtttttttagattggtttttttgatttaataatatttaaggtttttttatgtttttttatgatttgagtttatttttttttagtattgaataatatttcgttgatcggaggtattatagtttgtttatttatttattttttgaaggtttttaggtttgggtaattatgaataaagttgttattaatatttacgtgtaagtttttgtgtggatgtaagtttttgatttatttgggtaaatattaaggggtataattgttggatggtgtgtggcggattatatgtgaagggtatatttagttttgtaaggagttattaaattattttttaaagtggttgtattatttgtgtttttatcgtagtttttgttaaagtttagcgtggagagtttttgttttttatttgtgtattatatttattattaattttagatgaattaaaaaatagaaattttattataatgtggatacggtaaggataaggtataattttaaacgaatattgatgatcgtggtttgattttacggtttcggttggttcggtttggttcggggtgaagagtttgggtttttggtcgttttttatttagttggttttgtaatgaattgtatgttgtttaaatatttgtttttttaaatgtaggaagattttgtatttttcgtacgttaatattagacgtggttatgtaatttgttttgggtagtgaaacgtgatttatttggtatgtattattgttaaatggagttcgttaaagttagggttttgtcgttttatttttttgttgtgagataaatgagattttagataggggtcgttttttttaaaagagaaaatggagtataattttagttttttagcgaagggattgtcgtggtgagtgagagattttttatgtttgatgtacgttgttaagagttttgggtttgtttgttatgtagtataaggtaagttgatagagataggttttttgaagatttaatttattgttcgaggtttatgggaatgatagtaagggtttggtggtattttgagttgttttggttatttggatatatgtttagaaatgacgtagagatttatttttgtaagttgtgtttagtgttttgttggtgttggtttagtttgttatatttgtaggttggaggttaggtgtttttagttggtagtgacgggttttgagtttttttttggttattatttattttgttatcgtgtagttttatgtgagtgttttaataattgtttagtaagttattttttttttttttgatga

SEQ ID NO: 228 - DNA, 1508 bp, Artificial Sequence
  chemically treated genomic DNA (Homo sapiens)
attttataattataaatatttagtgtattttgtaaatatggtataatttgttggtataaaattttattgttttagaaaatatcggtaataaaattatagaaaagttaaagatttttattttttatttcgaagcgtttgggagatattttagaaacggatgggaaatgttaaattttgtatgtttgtttatttttttttttatatcgattagatgtaaacgagtgttattaaaagtatattataggtatttatatagattttttttataagggatttataaagtttagatgtgaaatgtattttaaagggtttttagtcgttttttatttttttttttgtgaaatagggaagatatatgtgtttttaagggtagagatggaatttgggttaatgggtcggggggtggggggaagttggaagggattgttttaggatatggtaggatagtggattgtttttgtcgttttgttgtttatatcggggttttttgtaggcgcgtcggttttttttttttttgttgagaagaagttttgttaaaatattcgtttttttcgggaattttttcgtgggtttaaagcgggaaaatgttgttttaggtttaaaataatttgtttaagttttttagcgcgggagaaacgtttttattcgttttttgttttcgggggtgtttttcgttttttgttgttagaattttggggagtgtttagattcggggtagtatacgttcgggttaatcgcgagtagaataaatttttggtgggcggttaggaagtttttttttagttatcgtttttttttagtgtttttttttttttttatataatataagattttttttttttagtttttttaaagtatagtttaaggaaatttttttatagtttttatttagttacgggttagtatgtttgggggtaaatacgtagattcggaggtaggtattcgtgggggggcgtcggttcgggcgtgcggggaagtgttcgtttttgttatttgtttttttaaatatttcgattgttgatttggttttttagttttttttttatttcggagtatttttttggcgttggtatcgttgaagaatgggtttgggcggggaggtgaagagaagttaggaatgttttatgtttttttaatggagagggggtttcgggagtttttgagttaggaggatacggaaaaggggattggggttttgagattgggtttgttgggtttaagacgcgttttttggatgggtttaggatgtttttttgtcgcgggaatttcgcggttcggttttgtttgttgggggttcgaaaaagtggattgtagggtggaaggtgttatttattcgagttttggggatagttttcgggatttttcgttaagcgtttaaaacggtaggtttttaagcggcgcgcggtgtttttgtattttttaaaatttttgaaatattttaaaaatttttttgtattttggcgtttggtagggttttttaaaaaaagtaaattttttttttaaatgta

SEQ ID NO: 229 - DNA, 1508 bp, Artificial Sequence
  chemically treated genomic DNA (Homo sapiens)
tgtatttgggagggaggtttattttttttggaaaattttgttagacgttaagatgtagaaggatttttgagatgttttaagaattttggaaagtgtaaaaatatcgcgcgtcgtttggggatttgtcgttttgggcgtttggcggagagtttcggggattgtttttaggattcgggtaaataatattttttattttgtaatttattttttcgaatttttagtaggtagggtcggatcgcggggttttcgcgataggggagtattttagatttatttagaaaacgcgttttgggtttaatagatttaattttaggattttaattttttttttcgtgtttttttagtttaggggttttcgaggttttttttttattaggaaaatataaaatatttttggtttttttttattttttcgtttaggtttattttttagcggtgttaacgttagaggagtgtttcgaagtggaaagagggttggggggttagattagtagtcgggatatttggagaggtagatagtagaagcggatattttttcgtacgttcgagtcggcgtttttttacggatgtttattttcgagtttacgtatttgtttttagatatgttggttcgtggttggatgaaaattgtgaggaggtttttttgggttgtgttttaagggaattgaggaaggaagattttgtattgtatggggggaaaaaaaggtattggaggggggcggtggttgggagggagttttttggtcgtttattaaaggtttgttttgttcgcggttggttcggacgtgtgttgtttcgggtttaggtattttttaaggttttggtagtagagggcggggagtattttcgggggtagagagcgagtaagaacgtttttttcgcgttggggggtttggatagattattttaaatttgaggtaatattttttcgttttgaatttacgggggggttttcgggggaggcggatgttttggtagggtttttttttagtagggggggagggagtcgacgcgtttgtagagagtttcggtatgggtaataaggcggtagaaataatttattattttgttatgttttaaggtagttttttttaatttttttttatttttcggtttattggtttaagttttatttttgtttttgaaaatatatgtgttttttttgttttatagagggagggatgagagacggttaggaattttttagggtatattttatatttaaattttgtggattttttatggaaggaatttgtgtgggtgtttgtggtgtatttttggtgatattcgtttatatttagtcggtgtggaaagaaaaataagtaggtatgtagaatttaatattttttattcgtttttgaaatgttttttaaacgtttcgaaataagaaatgaagatttttaatttttttataattttattatcgatattttttggaataatggaattttatgttaataggttatgttatatttgtaaaatatattaaatgtttataattgtagaat

SEQ ID NO: 230 - DNA, 1984 bp, Artificial Sequence
  chemically treated genomic DNA (Homo sapiens)
  unsure (9)..(17): unknown base
  misc_feature (9)..(9): n is a, c, g, or t
  misc_feature (17)..(18): n is a, c, g, or t
  misc_feature (33)..(33): n is a, c, g, or t
  misc_feature (41)..(41): n is a, c, g, or t
  misc_feature (49)..(50): n is a, c, g, or t
  misc_feature (52)..(52): n is a, c, g, or t
  misc_feature (54)..(54): n is a, c, g, or t
  misc_feature (62)..(62): n is a, c, g, or t
  misc_feature (80)..(80): n is a, c, g, or t
  misc_feature (84)..(84): n is a, c, g, or t
  misc_feature (127)..(127): n is a, c, g, or t
  misc_feature (157)..(157): n is a, c, g, or t
  misc_feature (159)..(159): n is a, c, g, or t
  unsure (175)..(207): unknown base
  misc_feature (175)..(175): n is a, c, g, or t
  misc_feature (207)..(209): n is a, c, g, or t
  misc_feature (214)..(214): n is a, c, g, or t
  misc_feature (1181)..(1181): n is a, c, g, or t
agttttagntattattnntatttttattaatgnttttgggnttataggnngngnttttttgnttaaatagtagttaatgnaggnattttaaaaggtatattattttatatttatttagtggttatgntattatttaatttttattataattttgtgngnttagtataatttgtgnttttattttatttgtgaataaatggaggtagnnntttgngtaatttataagtaagtggtagattcgggggttgtgtttagataatgtggttttagattttttgtttttttttgttttttgttgtattttgattgagtttagttatttatttttttaatatatattaattgttgtttttatgttttaggttttgtgttagatgttagaaatatatttttatttattggattttggtatggtttattgtttagtgttttgttatgttacgtgttatataatgtatttatttcggtatttagtttatggaaaataatgttgaaagatattgtatgtatgtttttataataaaattatgtaatttatgttttttttattgttttggttattaggaagtttttatttaaattagagtaaatatattagaatttgggtttgttattttagtttgttgaatttttttttttggtttagattttttattttggtttataaattttattgtataaatgttttttattgtaaaatattttaaattttttttaagggaaggttgtatggaaatgatatagtaaggttttttttgtatttttttagatttttattagggaaggtagatttagatgttttttttatttttagttttaaagttttttatttataaaattttttaagtagtgattattgttgttttgagtatttggaggtagtttagagtttttgaaaggtaaaatttatatataaaaagaagtttttttcgatttagattttagttttggtgttagatgtatatttgaggagtaggtggttagttagatttttatttgagtagttaataaaatttattgttttttaatggaattttttttgtaagttcgaattgatttgttatttttgtgatttgtgagatggtagggaagtattaaatattattatgatttgggttatagtggtgggaaaaaaggaaaaaagaaaaaaaaaatttattgttaagttttgttaggcgtanaaagggttggaattgttggggttattttatttgatttattggaaatagagtggattttattaatattttaataaagagaatttttttgtattaggttggaagtggtcgttagtttttcgtgtaattttattttttggaaaagtggaattagttggtattgtttagcgtgatttgtgaggttgagttttaatagtttaaagaagtaaatgggatgttattttcgcggggttcgtttttcgcgaggtgtttatttcgtatttgttatgtaaaacgagggagcgttaggaaggaattcgttttgtaaagttattggttttggttattagtttttatttaatgttttcgtgatgttgttgttgatttatttgggaagttggttggttggcgaggtagagtttttttttaaagtttggtttttacggaaaatatgtttagtgtagtcgcgtgtatgaatgaaaacgtcgtcgggcgtttttagtcggataaaatgtagtcgagaatttcgttcgttttgtgcgtttttttgttttaggtagggaagaggggttgtcgggcgcgttttgcgtttcgtttttgtattcggatcgttcggtacgggtagggtgagggggttttcggggggtcggggttttcggtcgcggcggcgaagatagatcggggttcggtagggaggttatttcgagtttagagattttaggtattttttatatataggtttttattttggcgtgcgtgcgtgtgtgtgtgtgtgtgtgtgtgtgtgtgtgtgtgtgtgtgtgtgtgtacgttcgttaacgggagga

SEQ ID NO: 231 - DNA, 1984 bp, Artificial Sequence
  chemically treated genomic DNA (Homo sapiens)
  unsure (804)..(1771): unknown base
  misc_feature (804)..(804): n is a, c, g, or t
  misc_feature (1771)..(1771): n is a, c, g, or t
  misc_feature (1776)..(1778): n is a, c, g, or t
  misc_feature (1810)..(1810): n is a, c, g, or t
  misc_feature (1826)..(1826): n is a, c, g, or t
  misc_feature (1828)..(1828): n is a, c, g, or t
  misc_feature (1858)..(1858): n is a, c, g, or t
  misc_feature (1901)..(1901): n is a, c, g, or t
  misc_feature (1905)..(1905): n is a, c, g, or t
  unsure (1923)..(1931): unknown base
  misc_feature (1923)..(1923): n is a, c, g, or t
  misc_feature (1931)..(1931): n is a, c, g, or t
  misc_feature (1933)..(1933): n is a, c, g, or t
  misc_feature (1935)..(1936): n is a, c, g, or t
  misc_feature (1944)..(1944): n is a, c, g, or t
  misc_feature (1952)..(1952): n is a, c, g, or t
  misc_feature (1967)..(1968): n is a, c, g, or t
  misc_feature (1976)..(1976): n is a, c, g, or t
ttttttcgttaacgaacgtatatatatatatatatatatatatatatatatatatatatatatatacgtacgtacgttagagtgggagtttgtgtgtggggggtgtttaggatttttgggttcggaatgatttttttatcgagtttcgatttgttttcgtcgtcgcgatcggaggtttcgatttttcgaaagtttttttattttgttcgtgtcgggcgattcgaatgtagaaacggggcgtagagcgcgttcggtagttttttttttttatttgggataggagaacgtatagaacgagcggagttttcggttgtattttgttcgattagaagcgttcggcggcgtttttatttatgtacgcggttgtattgagtatatttttcgtgggagttaggttttgaggagaggttttgtttcgttagttagttaattttttaaatagattagtagtagtattacgaaagtattgggtagaggttgatgattaggattaatggttttataagacggatttttttttaacgttttttcgttttgtatggtagatacggggtgagtatttcgcgaggagcgagtttcgcggaggtggtattttatttgtttttttggattgttggggtttagttttataaattacgttgggtaatgttagttgattttatttttttagagaatggaattgtacgggggattggcggttatttttagtttagtgtaaaaagattttttttattaaaatgttaataagatttattttatttttaataaattagataaaatggttttagtagttttagttttttntacgtttggtaaggtttggtagtggattttttttttttttttttttttttttttattattgtggtttaagttatgatggtgtttggtgtttttttgttattttataaattataaagatgatagattaattcgagtttgtagaaaaaattttattaaggggtaatagattttattaattgtttaggtgagagtttgattagttatttattttttaaatgtgtatttggtattaaagttgggatttggatcggaaggaatttttttttgtatatggattttattttttagaagttttgaattatttttaggtatttagaatagtagtagttattgtttaagggattttataaatggggggttttgggattgagggtaagagggatatttaggtttgttttttttaataggaatttaagaaaatgtagggaagattttattgtattatttttatgtagtttttttttagaaagaatttaaggtgttttataataaaggatatttgtgtaatagaatttatgaattaaaatagaaaatttgggttagaaggaaaagtttagtaaattgaaatgataagtttaaattttaatgtatttgttttgatttggataagagttttttgatagttaaagtaataaaagaaatataagttatatagttttgttgtagaaatatgtatataatgttttttagtattattttttatgggttaaatatcggaataaatgtattatgtaatacgtaatatagtaggatattgagtaatggattatgttaagatttagtggatggggatgtatttttagtatttggtatagggtttggaatatggagatagtaattagtgtgtgttaaagaaatagatggttagatttaattaagatgtagtagaaggtagggaggggtaaggagtttggagttatattgtttaggtatagttttcggatttgttatttatttgtaaattatntaaannnttgtttttatttgtttatagataaaatgaaantataaattgtattgantntataaggttgtggtgaggattaagtgatgntataattattgaataaatataaagtgatgtgttttttaagatntttntattggttgttgtttggntagaaggntntnntttgtggntttaaggntattgataaagatgnnagtgatgnttgaagtt

SEQ ID NO: 232 - DNA, 17897 bp, Artificial Sequence
  chemically treated genomic DNA (Homo sapiens)
atattgtataattttttatttatgtttaaagtaaaggatttattatatattttgaatatagtttattttttatttttatttggaattgttttttttttatggttttttttttttttaatttttattgtttataatatgatattataggttaggtatgtttgtagataattgggataatttatttttatttaagtaaaaattttagatggtagtttttttatttgggattatgaagtaggtaggattttttttttttttttaatagagtttaagtagtaagatcgaataagatgggatgaatttaaagagaaatatttgtatttgtttagttttttaattaatatttattgaatttttttacggttaggtgtgtaagatgttaggagggatgagataagatgatgatgatgatgatgatgatgatgatgatggtgatgatgatagtgaggatgagggtgaatattttaatgagagttttttatatgttagggattgttttaggtattttatatatattaatatatatatttattataatgattttgtattgttatgtgtattttatatatgaggaggtagaggaaggaaatgaaataatttgtttaagagtatagagtttgtaagtggtaaagataagatagaaataattttttaagagtagagagtggtgatttttggggatagggaagtggaaaagtggggagataaaggttgttgttttttttaataagttttgaagatttatttgattaggtttaagaaaaatttgataattattataaagtaaaaggaagaggagatgaggtgggtttttgggtatagatgtttgttttggaaagtttagggaggaaggggtgagaggaattgggttgtagtataggaatgggggatttgggaattagaggggattggttagggtgggttattgattgtagtgaatgtttatttgttgattgggttgtagtataggagtggggggtttggaattaagaggggattggtttagggtgggttattgattgtagtgaatatttatttgttgattagtttgatttagaagaaagggagagatggatgttggaggagagagggggtttcgagggagtttaggattggaggtgggaagatatttttacggatatttttttattttgatagatagaaaagatgatggtttgtagtagtagatttataaattgtgattgaaaggtttgatggttttttttattcgttttttttatgtatagagaggtggagtaatttgttttaggtattatagtttataagtggtgaagttggagttgggggttatagattatcgggtttttttttatgaatttttgttgtattttggttttttttaatttcgagtatttatgagttttaagaaagatagttgggaataggtgatttttatggttatttttggaatatttggttagaatattttagtataaaatttaagttgttgttaagtagaaatttttagtggatattagtttagaaaatttaattttattttgtgacggatttgtagcgcgtgtgtatttattaagtaaatttgattttattgttgattagcgagaaagaggaataatgtaaatagttagtgtaattgtatttatatttagtttcgtgagtttttgttattttagttggttgcggtgggggatgtggaggtgtatgtagtttttaggttttagtgaggggtttttgtatagggtgggcgttttttatgttttatgtgtatttaggtttgtattaaagatagttttttttttgtagcgtgatatttagttaagaaaattattttatttggtgtttagcggaagaaaatattttttttaatagggaaggaaaattggttgtgttgggttgagggaggggagtgtggaatttaaatggtgttttttttaggttttttttaaggtgatgtggattttgattttagaatgttattatttggaaaattgtgttttattgtttaaatttttgttttttttttttgtttttttttttttattttatttttttttttttgttttttgatttatttaatgttaatggttttttagaaggttaggttttttatataagtttagttttttgttaggtaattttttcggggttttaagttgtaaatttgggttgtttttcgtattttgttttgaggatttttttaaagagataggtaagggttttttttggtaaaatgtttttttaattttatgtattagttttatttgttattgaagaagtgggtcgttttttttgcgtttttgaatttgatattttttattttgatatttcgtatttttgaatttgatatttttgtatttttagtaggtaaaaaattaaaggtgtttatttaataaatcgtcgtaatggggagtttatgggaaaatgggtatgtgtaagttggttaaaggataataggtatataggttgtttgatttgggagggtttttagatagtaggatggtttttagagatgtatttttgttgttgttgttgtttatgattatgtttttagggtttagaatggtgtttgggtatagtaggtttttaatatagttagggaatgaatgagtttattttaattacgttgtatggatggagaaattgcgttttggggttgtattatgttatgtatttgtagaaaatgtttttgtttttttagtttttttttagtggcggagtataggatttagtttataagagtagtttaattttgttatttgtggaatgatagaataaataagttttagggtttagggaggtaaggtttttgttttagttttttaagtagttggaattatagttgtatgttattaagtttatttgattttttatttttttgtagagatgatgttttattatgttgtttagatttttttggaatttttgggtttaagtaatttttttatttttgtttttgaagtagttgggattataggtatttgttattaggtttggttagtttttattttttttgtagagatgggatattattatgttgtgaaggttggttttaaatttttggatttaagagaggtttttgtattggttttttaaagtgttgggattataggtgtaagttattttatttggatataatattttatttgaaataagaaaaatttttttttattgggaatgttgtagttgaattagtttaaatttataaagaatggaagattgtttagtggttatttatttatttattaattttagatgttaaattttttagggtgggggaatgtgtttttatatttaaggtatttttgaatgtagttaaattttgtagtttagttaaattttatagttaatagttaaattttgtagtttagttaaatttttttagtagtaaaatttatgatattggaattttgttttttatattggttatttgtaatagaataatagagttttagtattagataggttttgaaagattattgaatttaattttttttttttgttagtgagaattttgaagtttagatttgttgatttgtgatcgatagtgttaaagataggtttgaaatatagatgttttgggttttagaggtgttgtttgtttttttttatattttttttgttttagaaaatttttttttaaaattggttttaataattagaggggaaagttatggtttttgttttggggatagtatgggttggtatagaaaagaggtttataatttagtaggaagtgttgtgcgtgcgcgcgtgtgtgtttgtggaggcgtagggagggttatttgagtttgttttgggtttggttttgggtttagtggtaaatttaacgttgggtaggtggtttgaggataatgacggtgttagttgtgagttagattttttttatttataaaattatgtttttttatgtagtgttttttaatttggttgtacgttaggagttatttgggtagttttgtaaaaattttaatgtttagttggtttgtattttttgagattttgattaaattgttttggagtttatttttttttttttattatttatttatttatttattttttaatttggcggtttttttgggattttttatatgtagtaggggttgagaattgttggtttttttggttagatgggaatatgtaggttaatagttacgtataaatagagtagtagagtaggacggtgttaaggttggaaagggtgagttatgaaagtttaggaaattagaataggaaggggtgagaatttttttatttgggtttgtggggtaggagagaagagtttagtgggtaaggtttagtgagtgtgtttagaattgggaagatgaggggaagggtaagcgttgggcggcggtgggtaagatggacgagattaaacgggagcgaggattttagcgagagttttggcgatacggaaggttgagaatcggagggagtttgtcgggcgaaagcgaaggcggttgttgggtaggtagtcgaattcggttggagagtcgagttggtgagatttataggaagtgaagggagtcgtttagggcgtggcgtaacgagatttttagaagaaattttgaggtagagatggggggttttcgtttatacggagatataaggaagtttatatgtatacgtacgagcgcgtatatgaatacgtataagtatataaacgtttttttcgggtagggtatacgcgttcgttgtataggtcgaggttttggattcggaggggattgtagagtcgatttataattcgggtttcgatgtttttttcggtcgcgtttttacgattgtttgcgtaataggcggcggttttagtgggcgttcgtcgcgcgttgtcggagtttagtttagttcggcgcgttcgggaggagggagtagggagcggggaaggggtgtgtttcggttgcgtgttgggattgcgagggtttgggaggggcgaggcgcgggggcggggtcgcggcgtttataaagtcgtttttcgttcggacgtaaataaatttcgtttggtttttagttggtgttgaagttcgttagtttattattcgttttcggttttcgcggggcgttgggtcgttagtttcggtatcgtttttttttttttttttcgcgttaggtaagttcgcgttttttttttttaggcgcgacgcggagtagaaaggggtcgttcgtgcggtgtcgttggagcgttaggatcgttttttgtagtttcgcgtattttaggagtaagcgtttcggagttgtaagtgcgcggttatttcggggcgcgggcgcgagggggttttgggtgtagatatcgttgaagtggggggtttaattacggaaagggaggaaaaaaagatagggttttatttattttttttttagttggggattggggttttggaggtcgggaagggggcgatgagacggttcgaaaaaatattaggatagcgttttttggcgtcgttttcgaattttagttggcgtcgttggtaggggtgcgcgttggacgtgggtgtagaagggattaggtgagtgtgtgtgtgtgtgtgtgtgtgtgtgtgtgtgtgtgtttgtgtttgggaacggagagattgcgcgcgagtgtgtagatgaggggttggtagaggtgagtggcgttggtaaggaggttggagaggggggcgtgggtgtgtttggtttgtagattgggtcgggaacgggtgtggattcgagaggttggtggcgttttagtttcgtagtatatatagggcggtgtgtatgtgtgagtgtaagcgtgtgtgtggggggagggtttagggtgtgttatagtgtaatacgcgagtcggagtaagtgtttgcgagcgttattgggtagggtgcgttttcggaggaattcgggattggcgtatcggcggcgtgggagaagtgatttgggcgagaggggtttcgcggatatttggcggttttttgagttggttggagttaggagtggcgttattttcgttttcgtttattttttttcgtttttttttttttttttgtttttggtgttggtcgtttttgttttttacgggggaaaatagttggaattatttcgacgtttttgggggattcgtcgcggtttttgatttagtttcgggaggagatttcgggttgggtttggggaatgcggttggttttgggggaaatacgttgttacgtttttgttaaattagtagttggagttgggatttagtgggtcggttttttatttattttttttttatatttttcgtttgttgtttttgttgtttttgggggttttgaatagtacgtttttgtggtttggaagtgggagatgtttggtagtgggtgggggaggtagggtttttggttattttatgtttatttaagaatattttttttttacggacgttgggggtattttagtttgtttggtttttttaagttattgggaaatatttaatatttagaagttagttagtggttaggtaggagggcggtagatatttttataatatttattagttgtacgggatttttttttaagttgttttaaaagaatatatttaaatataaattttttgtttttgttgtagaaatgtagttttaaggcgaattttttagtttagattttttttgttgagaaattttggcgtttttattgagttttataaatgtgattgaaataagtaaggtatagagggggtaaattttagcgttttttttggaagggttgttttttggtggggaagatatacggttggagacgtagatcggttttgtgtggtgtgtgtggcggtagagttagttttaggttggggtggtatagtgtcggggatgaaggaaggtgtaagggagagagagggttttggtgtggatggaaaattgggtgtttttttgatttgtgattttttagttttgtgggatcgtgttttttattgtatttgggtaaggaggaggatttgtttgttttgttttgtaatttggtttttggtttagcgtttggtaggtgggaggagttgaaatatgtatatgggatgaagtggatggttttgggttttttgttttatttttttgtgaattagtaggttgagtttcgggcgaggtaatagattgtgtatgggtggaggtgttggtttttgtttttgagggattttggagtgtttgtttgggttttttgtgaggaagtttttttggagtaataaagtttgattatttggaatggaataaaaaatttatataggatttatttagtttaatttttttttattttatagatggaaaatgaggtatagggatggggagggatgtgtttaggtcgaattgagttggagtttagttttgtgagaggtttttgggtgggattgaaggtagtggaaagggtttttggtaggattttgtttgtttgttatggaggggcgaaaggaaattgtatttttattgaatttttggtgaggaaatttttgaggttaaaggggtagagcggaatgattttttttaagtgtaaattaggtgtttttgagagattagtaaagttagtttgaagggtaggggtttagaggttgtagttttttgagttggtttttgattgaatggggttgttttttttttatgatagaagatagattttaattgagttgagggtttttttgggttacgttgaaattcgttggtttgaatttgtttttttatggatttgaaagaaagatagtattgtgtttttcgggtggtttaaagttgtagtttttttttgggatttaattttagagaattttattttagatgtgatttagaggttttgttttgggagagaaagcgtgatgatttagtatttgagatttaagtagggtttaggtttgatttagtttggaaggaaggttagggagggatacgatatttttttttttttagagtagttattgtttttttttatttgtttttattttcgtaagaacgttgtttggatcgtattgttttattgaatggatgaggtaattgaggttaggagagttttaggatttgtttgttgttatatggtttaggtgggagagttagattttgaattcggatagttggattttagagtttttgttttttttttatgataatatgttggggcgtttgaagaaattaggtttaaatgaaaaggtagttaggagttttatgttttagtttgtttttttgtaaaatgagagtaatagatatgatgttattagaatgtgtaaatattaatttgtgtaatttgagaatagtattgagtatgtggaaaatagcgtgtaggtgtttgtcgttagtagtattcgtagaagatatttttaaggtatttttttggtaggtagagtttgggattttttgttttaaatttatttaaggttgtgaaagtgtttgtaaatgtttgatttaggtattgttttttgttaagtttatgtaggttgtataatagtgttatgaaaattttgtttgaaatgtatatttttaggttcggttttttgcgattttttttttattaggggatatgttgttgttttaaagtttttttggttgggttgggaatggggtattttgtaggtagatagagttgagaatttttgttttggaatgataggggagagaagaaggaaggtgtagttatatatgtcgttgtatttttaggttattttgtgtttatagtgttagggaattagtgagtgtttagtaaatagtttttgtttgttatagtgttttggaggtttaatgtattatattagttaattgaggtagaagatattttttttattttttaggttagaaaattgaggtttaggttggtgatttttttgtttagagtttagtgagtggggttttgtttaaggtgagttttttgagttttttttattttttaatattgcgtttggaggttatttatattttttgggtttattttttgagaaggagtttgttttttggatttattttaggttgttgtttttgttttttttgatggttgtgtgatggaagtatcgcgtgtttatttgttttttattttttaatttggagatagaggtaggttagatagcggttttggttgagaatttagtttaggtaggtaggtagaagggttggggatattgaggttttataggaaggcggttgtagaggtagagggttatgagtaggtgttaatttggagtcgtgttttcggggtgggggttatgtgaaaagaaatttgggttttttcgggtggggcgtaagttttagtattatagaatgggaatggattatataatcggggttataagtaggtttttttgatttagatttttgatttttttatttaatattgtttgtagatttgtttatgttttatttgtttgggttttatttttgattttttgagtttagcgggtttttttgtaattgagttggtagaaagtgaggttttttaatagtttgggggttttgagtgttttttttagtagtttaattttttttttttttaaatttgtggggagattttttgtagttatatattttaaatttgtatagagttttgtttgaagagaggtgggtgggggtttaggtttttattttgtttttttgtttttattttttgttttatttttacggaatttaagaagattttaagtaattttttttaaatatggatgtgagagggttatttaagaggtgggtttatggttttttttagttgggaatgtttattatttttttttttttttttttaattatggaattttttttttttttttagaaaggtttttttggttgttttttgttggaggggaggttgggttgggttttttttgggatttgtttatgttttttatgaaatttgagagtttgtttttagtaggtgttgtgttagtggtggtggaaaggatatttttattgattaaggaagtaatttggattattttgtatagataagatcggaggtttatttcggagggtggaaattgtaagattattttggggaaggattttgttagcgtggttagtattttatttcgggataaagggttttgtatgaggaagttattttttcgttttttgttaatattggtttcgtttgtgtgatttttataaattattttagattatttagcgtagtttatgtttgttttgtaattttataaaataattttttaaggagattagtgtttttttttggatttttagttatttatttcgtttttttagacggtcgttttttgtttgttaaataaattattcgtgttgttaaaattttattgagaatttttaggaagatttcggttgtattgtagaaaagaggtgggttttgacgagatttttgatatttttttttttttgttgttgtgtttgggatatttttgttgatttttttggtgttgtgtttaagttgaatatatagtagtttagttttagttttagtttttttggatttatatttagggagtgaatgcggttttggtttgtttgagagggagatagtggggtttatttttttagtgattttttttttattttttgaatattaaatattattgatgttttttgggttttaggttttattgtaaagtataggggttttcgaggagtttttattgtggttttgttttttgatatttgtattgtttttttgattttgattgttttgatatagttttttaatttttaaattagggaatttttttgaaggtttagtgaatttatttatattgtttgttgagttgattagttaagaaagatagttcgtgaagattgttaatttttttattttttttagggttttgagttttagaagggttagaaaatattaagagagtttatgaattgttttgtagtttgattttaaaatttttttgggtaaagaaatgataaaggattgtatttatagtaaggtagggttatttagggtttattttaaggtggttttttttgaggtttaggtagaaatggtgttgttttcggtaattttttggggaagttgttatagtaaatagttatagtatatgttgattttttttttttttttaaaaatttgttttataaagagtataatgtgttggagagaatattggtttttatgtggttttaaaattaggtatgttatagagggtggaatttgggttagttgttgttggtgataatcgatgttatttttgttagtaattttcgtttgttttttttttatttgttttattgaaggtttttaggggattgttgttcgttttttttcgagggaatgagtgttatatttgtatttataataaattagtgagttttttattttttttttagtagggaggaatttagatatgtggtttttggaagttaagtgggtttttgtgtttgtttttgagttttaggttatttatttgtgaattgggtataatatttagtttttttcggggtaatttttttgaggagtaagtgaaatagtgtgttgagtgaatgtttttttaaagtattgagttggtcgttttaggaaggtattatgggggagttgaaaatagagaattttttgggtgttgtgaagggagaaaagtttaagatgttggttttgttaaaagtttaagtttgtttatgatggtttagtggtgattgtagggtggaggagaggtatgtgattgttttagttgatttttatacgttgaaagttttatggttacgtgtagtttattttataacgttgtatttgggttacgggtggtggtgaggattgtggatatatttagggtaatgtgagattattgttaatattttttttaaggttgttttaattttaaagtagttagtttgatgtttgttgatttggggtatatattttaattttttgatgttttagttttttcgtttgttaaatggtgatatgttggtattttttttttagggtttttgtgaggtttaaaggaagtatcgggtttagagtttagttagtgttatagatattgtttttggtgttgtttttgtggtgtgtttgtgtagggttatattgttgtttttttgtggttgttttttttggtgggcggaatttggaatttttagaatagattatggatgtttttttgttggatatttttttagttttattttgtgggagttgtggcggggtttaggagagtttgtttaagagggtgtgtaggtgggtggtagagttggagtaaggtattagttttaatagataggagtttgaggttggtagaagtgggggttttggtttaaggtgcggggttaatttggttagagttgagtttggtagggttttggtaagattttgtggtttttttgttttggtgaagtatttttttgtttgggtttttatttgtttgtaagtttgttgtggatagcgtgatttttatagacgtatattgtgtttattttatagatggagaaattaaggtttagagaggaagtgatttgtttagagttatggaataggaaagtggtagggtttttatgttttgatttttaggttagcgtttttgttgttttattgaggtttttgggaattataggttttgtgtgttttttttagttttttaggggttgttgaatagtttttaagtggtgtcggattattgaagatgtttttgtttattgtttttttaggttttagggttacgggttacgtttttttttttttcgggtagattttggttttggttttgtttggtatttgtgatttagtttttttttgatttttttgggtttgttggattggaagggtatttgtgtagttttttttgggtttttattatttattgatagatagtgttggtggagagaagggttttagtggtgacgtattgggtttgataattagaaattttggtggtatttgttgagtattttttatgtgttttttttttcgttgggattttaggattgaaatttaggttatatttttatagatgttttggtatttttaaggtaattttgaaaggaaagtatgttgatgaattaagtaattgtttgtttaattttttatgttatttttgaatttaagttttattgttgattattgggagtaggagttagtatgtttattgatagataagtaaattgaggtaaagaggttagatagttaggtatggtggtatatgtttgtaattttagttatttaggaggtcggagtaggaggattatttgaatttaggagtttgagattagtttgggtaatatagtaagattttgtttttttaaaaaataagatgaataatatatttttaaaaagagattcgataaattatgtaggattatagagttaataaatggtgatattatggtttgtaagtttttttttagtttttggttatttttcgtttttttggtattggttttttcggaattttttttaggtaggtggatgggaaaagaagtgaagatataggttggtagttggtgttgtgatttggagttttgtttttggtgttaagttgggttttagttgaaggagatttgttggaggggttttttttgtgttttttggggagtaaagatggttttggagatggagatacggtttgttagttttaagttattttaaaggtggggttggtgggttaggagttagttttggttttttcgttatgttgtgtgtggttttgttttgttattttatttgttggaggatttttttgatgttttttagtgggttttaatattttgtgattaggattttgtatgaggtagagggagggtaggagttggagtttagtaaggattttaagtttagggataggttttatttgttatatttgttaagtcgtgagggttttaggtgttcgggaggagggagtaggagtggaagtattagttcgagtcgttaaattaggttacgtattatttgttattttttgttggtagaaggagattatagatattagaagatagtagtttttgttagaattgggtttttttatgatttttaggtggtgattttgaattttagaaaaagtgttttggggagagtggagtgaaggaagagtgtgaatattggatttgattttattttagtttttgtgttgtagttagtagggtgagtttaggatagttggtagtcgtttgggtttagttttttttttcgtgaatgaaggtggtggggagtgtacgtgtgcgtgtgagtgcgtgtgagtataaatgattgtggatgtgagagtttatgaaagtgagaatgtattagtgtgtaagaaagtgtgagtatgtgagaatgagtgtgtttgtgagaatgtatgtatgtgtgagtataagtgtgtgaatgtgagaatgtttgagtgtgagaatgaaagtttgtaagtgtgttagtgtgagggaatgtgtgagtgtatttgagagtgtgtgtgtgtgtgtgtgcgtgtgtgtacgtatgtattagattaaataagaatgtatttaattgatattttttggatattgttatttattaggaattattaaaattagttattttagaggagggtggatgtcgtattaggggatatttggtaacgtttgtagatttttttgttggtcgtagcgtggggtgtatgttgtgggtatgtggtgggtagaggttagggatgttgttgagttttttttcgtgtttagggtagtttttaaggtagaggttgtttgtggggtttaaatgttagtagtgttgagttgaggatttttgtttaggaggtatagacgttgttttggatgttgtttagatagtatttgttttgttttttagggggatagatagatagtggatatagtttagatgtagtttgatgagtgagtttaagggagtgtttgttttttcgggattgtgagtttcgtgggggtaggaattgggtttgtttgtttatgatttttagatgagttttatagttagttttattattatagttggtgttatttttgttttgagttttgtgttgggtatatagaatttagtgggtagaaatttttgaataaattttgagttttttattttgttttcgtgaatttagatgttttttgagggttagtttggtggcgtgggggttgggagtgggtagattgtagggagttaagttttggggtggagtggggtttaggtttttttttttggtttgagtcgaagtattttggttttttaaattttaaaatttttattttttaatatttttatatgttgaatttttttatatgattttttttggataaaagtttttgtaaaaaaagtttgaaaagttttttggttgaggtattagggataaggtaagggttgtttgatgggtttaattcgggagaattgaggtgagggagtcgttttttttttattttataggttggttagatggtggatcgttagtagttggttgggttaatttgtagagagtattttttgtagtttttggtttatgcggttttagtattgtaggacgcgattaatatgtaggttatttcgaggtttgtagtttttatagtttttttagattagtgtaaagttttatttagtttttcggtagattttagagtttaggatattttttaaatggtttaaaattaatggaattatttgggggataataaataatgttattagatattgttaaatgttttttgggagagaaaattttttttagtttagatatatttcgtgattatttttagtagttttatttttggattttttaaaggtttttagtagtgagggggttgggttagagaaggttttattagtttttaaaagtagatgtttaagaatttgatatttttaggatatatagcgatttttttaatttattgttttatgtggtttgggaagttaagttgtaggaataaaaaaggtgtcgggtagggtaaagaggttttattagatagaggaaacggggaaggtggatatttttgttttttttgttttggagaacgagagagttggtggagattgatagatattatgttttaatgtgattacggtttttggaagttaaagagaattgattaaattgggttgaattatagtatttttcgagtttttttaaatgtagaatttgttttttagatattgtatttttggggtttagtaatgatttaaaagtgaattttattgaaagtatgttgttgagttatattgtttatttatttagagagggagttgtagtttgattttttgtttaggagagtttttcgtgttgggagttagaggtagagaaaagaataagttatttgtttgatgaagtttatagataggattgtttgaatttatttggtgggatagtgagagttttttgattttattttggcgcgttttgttgagtagggtatgttaagaagtttttgtgaaatgagaagtttttttatttttagaatgaggggtggcgttggtagggttttgggtttttggaaggttttttaggttatgtaggcgaggtgttttataggttagggttttgggattacgaatttgttgaattagtaaggttaatagacgcgggttttttatgttttttgtttttaagttggtagttgtttaggaatgtttataaatataaaatcgattttgtttttagaatgttttggagtatagattttaaagtttgtataaagttatttttgtggggttggttatttattggggaaaattatgttggggttttagattagagtattttagtggagagtaggatttgtttacggaatgttatgtgttggtataagggatggattcggggtggattcggggtggttcgtatttgtcggttgatttttaagaggtgttttattaggtttttgggagtttttgggtttttagaggagttttaggtaggaattttagaggtttgtattttttcgattattgtattcgaggggttttgggtagtgcggggtttaggtttttattttgaagttggttgtgtgagggttttggttaggcgttttttatttagaaagtttggatttgtgaattgggtgggtggtttgggttttttttttttgttatttatttttttttcgtcggttttttgttgttgtttgtaagatttgattttattttgtattttttatgttttattttagggattgatgggtatttagtttttttaatttgattattgatttagaagaatatatgtttatatttttggtttttagatttagtttttggaggtatgtttaatagatagtattatttgtttaagttttgtattttagggagttagtggtagtattttaagtttttttgggttgtgttttagtttggttttgtagtttatatttttgtatttgttttgtgttagagtataggtaatttttttggtttattttttgttttgatttaggaagtgttttttgttttggaggtttttttttttataaaattgtattgtgcgtttaaatgtttgttaaattttttgatttaaggtttttttttgtttttttttttttttagtaggtagtcgagagttttgtatcgtggggtgtgtatgtgtgtttacgcgtatgcgtgtgtttgtgtgtttgtgcgtttgtattattaattttttgttagggttaattgtgaggttgaagtttgtattatgtttatacgtggtaagtatcgtgtgagtttgtgttttttttttattgttatacgggggttgtttgattttgggattagtaatgtaggtttttttttagaatgtagtgagttgtattttgggtatggtgggtgggtttgaatttggtatggggatttgtttgtgaggttgatttatttattttattgggagggtggtgtttgtgagttttagtatttttttttaggaaatttattgcgttggttttaatgggaagattgggttgggtttatgggttgtgtgtataagggatttttttattttttgtagtgtattacgagggaggtgaagttgttgggtagagcgtaggtttggtttttttgttattggttttggatttgttttttttaggaaattttttagtaggaagtgttgattttttggtttttgtttttttgtagg

SEQ ID NO: 233 - DNA, 17897 bp, Artificial Sequence
  chemically treated genomic DNA (Homo sapiens)
tttgtaaggagataaaggttaaaaggttaatattttttgttgagaggttttttaaaggaagtaaatttaagattaatggtaagaaggttaggtttgcgttttgtttagtagttttatttttttcgtgatgtattgtaggggatgaggaggttttttgtatatatagtttatggatttaatttagtttttttattggggttagcgtagtggattttttgggagaggatattgaggtttatagatattatttttttaatgaaatggatagattagttttataaataggtttttatattaagtttaggtttatttattatatttaggatgtagtttattgtattttagaaggggatttgtattgttgattttaaagttaggtagttttcgtgtgataatgaaaggggaatataagtttatacgatgtttattacgtataggtatagtgtaagttttagttttatagttagttttaatagaaggttggtgatgtagacgtatagatatataggtatacgtatgcgcgtgaatatatatatatattttacggtgtaggattttcggttgtttgttaaaagggaagaggggtagaggaaaattttaagttaaggagtttggtaggtatttgaacgtatagtataattttgtaagaaaaaagatttttaaggtagaaagtattttttggattaaagtaggggatggattagaggggttatttgtgttttaatatagggtaggtgtagaagtgtgggttgtaaaattagattgaagtatagtttaggaagatttggaatgttgttattgattttttggggtgtaaggtttgggtaggtggtgttatttattaagtatgtttttaagagttgaatttagaaattagaagtataagtatgtatttttttagattagtagttaagttagaaaaattaaatgtttattaatttttggggtgaagtataaaaaatgtagaataaggttaagttttatagatagtagtagaggatcggcggagaagaagtaagtgataagagggaagagtttaggttatttatttagtttatagatttagattttttgaatggaaaacgtttgattaaagtttttatatagttagttttagagtgggaatttgggtttcgtattgtttaaggtttttcggatgtaatggtcgagagaatgtaagtttttgaaatttttgtttagggtttttttgaagatttaggaatttttaagaatttggtgaaatattttttagaggttagtcggtaagtgcgggttatttcgaatttatttcgggtttattttttgtgttaatatatggtatttcgtgggtagattttgttttttattggggtgttttggtttggggttttagtatgattttttttagtagataattagttttataagaatggttttatatagattttggagtttatgttttagaatattttgaaaataaagtcggttttatatttgtgagtatttttgggtagttgttagtttggaggtaggaggtatgaaaggttcgcgtttgttagttttgttaatttagtaggttcgtggttttaagattttggtttgtgggatatttcgtttatatggtttagggagttttttagaaatttagggttttgttaacgttattttttattttgggagtgaaaggattttttattttataggagttttttagtatattttgtttagtaaagcgcgttagggtgaagttagggggtttttattgttttattaggtgggtttaagtagttttatttgtgagttttattaagtaggtagtttgtttttttttttatttttagtttttagtacgagagatttttttaggtagaaagttaggttgtaattttttttttgaataaatgagtaatgtagtttaatagtatgtttttagtaaaatttatttttaaattattgttaaattttaagagtgtaatgtttggaaaataaattttatatttaaaaggattcgagaaatgttgtggtttagtttagtttggttagttttttttggtttttagaaatcgtgattatattaggatatagtgtttgttagtttttattagttttttcgttttttagaatagaaaagatagaaatgtttatttttttcgttttttttatttggtgaaatttttttattttattcggtattttttttatttttatagtttagttttttagattatatgaggtaatgggttaaaaaaatcgttgtgtgttttagaaatattaagtttttgagtatttgtttttgggagttggtggggttttttttgatttagtttttttattgttaaaggtttttgggaagtttagagataaaattgttgaggatgattacggggtatatttaaattaggggggatttttttttttaggggatatttggtaatgtttagtgatattatttattgttttttaaatgattttattgattttgaattatttaggaagtgttttagattttgaagtttgtcgggagattggataaagttttgtattagtttggggggattgtgggggttgtaggtttcggggtagtttgtatgttggtcgcgttttgtaatattaaggtcgtatgaattaaggattgtagaaggtgttttttgtaggttgatttagttagttgttggcggtttattatttggttagtttgtagggtgggaggagagcggtttttttattttagttttttcgagttgggtttattaagtagtttttattttgtttttgatgttttaattaaaaaattttttaaattttttttgtaggagtttttatttaaaggaaattatgtaaggaagtttaatatataaaaatgttaaaaaataaaaattttaaaatttaaaaagttaaggtgtttcggtttaagttagggaaaggggtttgaattttattttattttaggatttggttttttataatttgtttatttttagtttttacgttattaggttggtttttaaagaatatttgagtttacggaagtaggatggaaaatttaggatttatttagaggtttttatttattaggttttatgtgtttaatatagagtttagaataaaaataatattagttatggtgatgagattggttatgggatttatttggggattatgagtaaatagatttagtttttgtttttacggagtttatagtttcgaggggataggtatttttttgggtttatttattaggttgtatttgggttgtgtttattgtttgtttgtttttttggagggtagagtagatgttgtttggatagtatttaggatagcgtttgtgttttttggatagagatttttagtttagtattgttgatatttgggttttataagtagtttttgttttaggggttgttttgagtacgggaggaggtttagtagtatttttggtttttgtttattatatgtttatagtatatattttacgttgcgattagtaaaagaatttgtaaacgttgttaaatgttttttggtgcgatatttatttttttttggaatagttgattttagtaatttttagtaggtaatagtatttagaaaatgttagttggatgtatttttatttaatttagtgtatgcgtgtatatacgtatatatatatatatatatttttaaatgtatttatatatttttttatattgatatatttgtaaatttttatttttatatttagatatttttatatttatatatttatatttatatatatatatatttttataaatatatttatttttatatatttatatttttttatatattgatatatttttatttttatggatttttatatttatagttatttatatttatacgtatttatacgtatacgtgtattttttattatttttatttacggaggagggggttgggtttaagcggttgttagttgttttgagtttattttgttggttgtagtataggggttggagtggagttagatttaatgtttatattttttttttattttattttttttaaaatattttttttgggatttaaagttattatttgagaattatggaaggatttagttttggtagaagttgttgttttttggtgtttgtgatttttttttgttagtaggaaatggtaggtgatacgtgatttggtttggcggttcgagttggtgtttttatttttgtttttttttttcgggtatttgaggtttttacggtttagtaagtgtggtaggtggagtttgtttttgggtttgaggtttttgttggattttagtttttgttttttttttgttttatgtaaagttttaattatagaatgttgggatttattagaaagtattaaagaggttttttagtaggtggggtggtaaggtagggttatatatagtatggcgggggaattagggttgatttttagtttattagttttatttttggagtggtttgggattgataaatcgtgtttttatttttaaggttatttttgttttttaagaagtatagaagaaatttttttagtaggttttttttagttaaaatttagtttagtattaaaaatagggttttaggttatagtattagttgttagtttgtatttttatttttttttttatttatttgtttgggaggaatttcgagaagattaatgttagagaagcgaaaggtagttaggagttgggggaaggtttgtaggttatggtgttattatttattagttttgtgattttgtataatttatcgaatttttttttaaaaatgtattatttattttgttttttagagagatagggttttgttatgttgtttagattggttttaaatttttgggtttaagtgatttttttatttcggttttttgagtagttgagattataggtatatgttattatgtttggttatttaatttttttgttttagtttgtttgtttgttaatgggtatgttaatttttgtttttaatgattagtagtggggtttaaatttaagaatggtatggagaattaagtaaatagttgtttaatttattaatatattttttttttagggttgttttggagatgttaggatatttgtgaggatgtggtttgggttttagttttagagttttagcgaggagagggatatatggaaaatgtttagtaaatgttattaaggtttttgattattaggtttagtgcgttattattggggtttttttttttattagtattgtttgttaatgagtaatgagggtttaagaggggttatataaatatttttttagtttagtagatttaggagagttagaggagagttggattataggtgttaggtaaagttaaggttaggatttgttcgaggaagaaaagaacgtgattcgtgattttgggatttgggagggtagtgggtagaggtatttttagtaattcgatattatttgagaattgtttaatagtttttgggggattgagggggatatatagagtttgtgatttttaaaaattttagtggggtagtaggaacgttggtttaggaattagggtatggggattttgttatttttttattttatgattttgagtaagttattttttttttgggttttggtttttttatttgtaaagtaggtatagtgtacgtttatggagattacgttgtttataataaatttataggtaaatggaaatttaggtaggaaggtgttttattaagataaaagggttatagggttttattaaggttttgttaggtttagttttggttagattagtttcgtattttggattaaggtttttatttttgttagttttagatttttgtttgttaagattagtgttttgttttagttttgttatttatttgtatatttttttgagtaaatttttttgggtttcgttataatttttatagggtgaggttgaaggggtatttagtagagaaatatttatgatttgttttagaagttttaggtttcgtttattaggaagagtagttataggaaggtaataatgtaattttatatagatatattataaaaatagtattaggaatagtatttgtggtattaattggattttaaattcggtattttttttaagttttatagaaattttaggagggaggtgttagtatgttattatttaatagacggggaaattgaggtattaagaggttaagatgtgtgttttaagttagtaagtattaagttggttgttttaaggttaaagtaattttaaagggaatgttgataatgattttatattgttttaaatatatttatagtttttattattattcgtggtttagatataacgttgtaaggtgggttgtacgtgattatgaggtttttagcgtgtggaggttagttgggatagttatatgttttttttttattttgtagttattattgagttattatgagtaggtttgagtttttggtaaaattagtattttgaatttttttttttttataatatttagaaggttttttgtttttagtttttttatagtatttttttaagacggttaatttaatgttttggaaaagtatttatttagtatattgttttatttgttttttaaggaggttgtttcgggagaggttgggtattatatttagtttataaatgggtaatttgaggtttaaaaataaatataaaggtttatttgatttttaaaggttatatgtttagatttttttttattgagggaaaggtgaaaaatttattggtttgttgtgggtgtaggtgtggtatttattttttcgggggagggcggataatagttttttggaggtttttagtgaagtagataaagggagagtaggcgggaattgttgataagggtagtatcgattgttattaatagtaattggtttagattttattttttgtaatatgtttggttttaaggttatatgaaagttagtgttttttttagtatattgtgttttttatagaatagatttttaaaaggagggaaaaaattaatatgtgttgtggttgtttgttgtagtaatttttttagaaaattgtcgagaatagtattatttttgtttgaattttaaggaaaattattttgagataggttttggatagttttgttttattgtggatataattttttgttatttttttgtttaaagagattttgaagttaagttataaagtagtttatgggtttttttggtgttttttggtttttttgaaatttaaggttttggggagggtgaggaagttggtagtttttacgaattgttttttttaattaattaatttagtaaataatatgggtggatttattggatttttaagaaagttttttagtttagaggttagggaattgtattagagtaattagaattaaggaaatagtataaatgttagagaataaaattatagtaggaatttttcgagggtttttgtattttgtagtggagtttgaaatttaggaggtattagtgatgtttgatatttaaggaatgaaaaagggattattaagaaggtgaattttattgttttttttttaaataagttaaagtcgtatttattttttgggtgtgggtttagaggggttggagttgaaattgaattgttgtgtgtttaatttgagtatagtattagggaggttagtaagagtgttttaaatataatagtaggaagagggaggtgttaggaatttcgttagggtttattttttttttgtaatataatcgagatttttttggagatttttagtggagttttggtagtacgagtaatttgtttggtagatagaagacgatcgtttgaggggacgaggtgaataattggaagtttaaaggaggatattggtttttttagaggattattttgtgaaattgtaagataggtatgagttgcgttggatggtttgagataatttgtggaaattatataaacggagttagtgttagtagaggacgaggaaatggtttttttatatagaattttttgtttcgagatgggatgttagttacgttaataggatttttttttagaatggttttgtagtttttatttttcggaatgggttttcgattttgtttatgtaagatggtttaagttatttttttaattagtggagatgttttttttattattattaatataatatttattaaggataggtttttaggttttatgggagatatggataggttttaggaaggatttaatttagttttttttttagtagaggatagttaaggaggtttttttggagaaaggaggagagttttatgattaaaaaggaggaaggagagatggtaagtatttttagttgagagaggttatagatttattttttaaatggtttttttatatttatatttgaagagggttatttggaatttttttaggtttcgtgggggtggggtagagggtgaaggtaggagaataaggtggagatttgggtttttatttatttttttttaaatagaattttatgtagatttaaaatgtatagttgtagaaagtttttttatagatttaaagaaaggaaagattaaattgttggggagggtatttaaggtttttagattgttaaggagttttattttttattagtttagttgtaagaaaattcgttggatttaaaaggttagagatggagtttaggtaggtagggtataggtaggtttgtaaataatgttaggtgggaaagttaaagatttgggttaaagagatttgtttatggtttcgattgtgtaatttatttttattttgtagtgttggggtttacgttttattcgagggagtttaggtttttttttatatggtttttatttcgagaatacggttttaggttggtatttatttatggttttttatttttgtagtcgtttttttgtggggttttagtgtttttagtttttttgtttatttgtttgggttaagtttttagttaagatcgttatttagtttgtttttatttttaagttgaaagataaaaagtaagtggatacgcggtatttttattatatagttattaagggaggtaggaataatagtttggggtggatttaggaaataagtttttttttaaaaggtgggtttagagggtgtgggtggtttttaagcgtaatgttggagggtggaaagggtttaggaggtttattttgggtagaattttatttattggattttggatagaagagttattagtttgagttttaattttttgatttgagaggtggaaagaatgttttttattttagttagttgatgtgatgtattgaatttttaaggtattatagtaaataagagttatttattgagtatttattaattttttggtattgtggatatagggtggtttgaaggtatagcggtatgtatgattatattttttttttttttttttttgttattttagagtagaggtttttaattttgtttgtttgtaggatattttatttttaatttagttaaaggagttttgaaataatagtatattttttgatggagagagaatcgtaggagatcgggtttggaaatgtgtattttagataagatttttatgatattattatgtaatttatataagtttagtaaaaagtaatatttaggttaagtatttgtaggtatttttatagttttgggtaggtttaggataaagggttttagattttgtttgttaagaagatgttttgagaatgttttttgcgggtgttattgacggtaaatatttatacgttgttttttatatgtttagtgttgtttttaggttatatagattaatatttatatattttgatggtattatgtttgttatttttattttatagaaaagtaaattgaggtatggagtttttgattgtttttttatttgagtttgatttttttaggcgttttaatatgttgttatggaaaaaaaataaaggttttgaagtttaattgttcgggtttaaagtttggtttttttatttgagttatatggtaataggtaaattttgaaatttttttggttttagttgttttatttatttaatggagtaatacgatttaggtaacgtttttgcgaggatgaaggtagatggagggagatagtggttgttttggagggagagagatgtcgtgtttttttttggttttttttttaggttgagttaaatttgaattttgtttgagttttagatgttgagttattacgtttttttttttaggataaggtttttgagttatatttggaatgggattttttggggttgggttttaaggaagaattgtagttttgggttattcgaaaaatataatgttattttttttttaggtttatgaggaggtaagtttaggttagcggattttaacgtaatttaggggggtttttagtttagttgagatttgttttttgttatggggggggggtagttttatttagttaaaggttaatttagggggttgtagtttttaagtttttgttttttaggttggttttgttaattttttaagaatatttgatttatatttaaaaaaaattatttcgttttgtttttttggttttaaaagtttttttattagaaatttaatgaagatgtaattttttttcgtttttttatagtaggtaggtaaaattttgttaggaattttttttattgtttttagttttatttaggagttttttataaagttgagttttagtttagttcggtttgggtatatttttttttatttttgtgttttattttttatttgtaaaatggaaagaagttggattaggtaggttttgtgtgagttttttattttattttaaatgattaaattttgttgttttaaaagaatttttttataagagatttaaatagatattttaggattttttaaaagtaaaagttaatatttttatttatgtatagtttattatttcgttcgaaatttaatttgttggtttataggagaatggggtagaagatttagagttatttattttattttatgtgtatattttaattttttttatttgttaggcgttgggttaggggttaggttatagggtagggtaggtaaatttttttttttgtttagatgtagtgggagatacggttttataaagttaagaagttataggttaggggaatatttagttttttatttatattaaaatttttttttttttttatatttttttttattttcgatattgtgttattttagtttggggttggttttgtcgttatatatattatatagaatcggtttgcgtttttagtcgtgtgttttttttattagaaggtagtttttttaagaaaggcgttggggtttgttttttttgtattttgtttattttaattatatttgtgaaatttaataagaacgttagaattttttaataggaagagtttagattgaaaaattcgttttgaaattatatttttgtagtaagaatagggggtttgtatttagatatgtttttttgaggtagtttaggagaaggtttcgtgtagttgatgggtattataaggatgtttatcgtttttttgtttggttattggttgatttttgaatattagatattttttagtagtttaaagaaattaaataaattgaagtgtttttagcgttcgtgaggaaggggtgtttttggatgggtataagataattaagggttttgttttttttatttattgttaggtattttttatttttaagttatagaggcgtgttgtttaggatttttagggatagtagggataataggcgggggatatgggggaggggtgggtaaggaatcgatttattaaattttagttttagttattaatttgatagaggcgtgatagcgtgttttttttagaattagtcgtattttttaagtttagttcgaaattttttttcgaggttgaattagagatcgcggcggattttttaggaacgtcgaagtaattttagttgttttttttcgtggagggtaggagcggttagtattagaggtaggggaggggaggaaagcgggggagggtgggcggaggcgaaaatgacgttatttttagttttagttagtttaaggggtcgttaaatgttcgcgagatttttttcgtttaggttattttttttacgtcgtcgatgcgttaatttcgggttttttcgggggcgtattttgtttagtggcgttcgtagatatttgtttcggttcgcgtgttgtattgtgatatattttggattttttttttatatatacgtttatatttatatatgtatatcgttttgtgtgtgttacgggattgaagcgttattagtttttcggatttatattcgttttcgatttagtttgtaagttagatatatttacgtttttttttttagtttttttgttagcgttatttatttttattaattttttatttatatattcgcgcgtaattttttcgtttttagatatagatatatatatatatatatatatatatatatatatatatttatttagttttttttgtatttacgtttagcgcgtatttttgttagcggcgttagttgggattcggagacgacgttaggaaacgttattttggtattttttcggatcgttttatcgtttttttttcgatttttagaattttaatttttagttaggggggagatgaatgggattttgtttttttttttttttttttcgtaattgaattttttattttagcggtgtttgtatttaaagttttttcgcgttcgcgtttcggggtgatcgcgtatttgtagtttcggggcgtttatttttggagtacgcggggttataaagggcggttttggcgttttagcggtatcgtacgggcggtttttttttgtttcgcgtcgcgtttgggagaagagggcgcgggtttatttaacgcgagggagaaaggaaaggacggtgtcgaggttggcggtttagcgtttcgcggaagtcgagggcggatggtgaattgacgagttttagtattagttgggagttaggcgaggtttgtttacgttcgggcggagggcgattttataggcgtcgcggtttcgttttcgcgtttcgttttttttagattttcgtagttttagtacgtagtcgggatatatttttttttcgttttttgtttttttttttcgggcgcgtcgggttgggttgggtttcggtagcgcgcggcgggcgtttattggagtcgtcgtttgttgcgtaagtagtcgtaggggcgcggtcgggaggggtatcggggttcgggttgtgggtcggttttgtagtttttttcgagtttagggtttcggtttgtgtagcgggcgcgtgtgttttgttcggaggaggcgtttgtgtgtttgtgcgtgtttatgtgcgcgttcgtgcgtgtgtatgtggatttttttgtgttttcgtatgggcggaggttttttatttttgttttagagttttttttaagagtttcgttgcgttacgttttgagcgattttttttattttttgtaggttttattagttcggttttttagtcggattcggttgtttgtttagtagtcgttttcgttttcgttcgataggtttttttcgatttttagtttttcgtgtcgttaaagttttcgttgaaattttcgttttcgtttaatttcgtttattttgtttatcgtcgtttagcgtttatttttttttttatttttttagttttaagtatatttattggattttgtttattgggttttttttttttgttttataagtttagatgagaggatttttatttttttttattttgattttttgaatttttatgatttattttttttaattttagtatcgttttgttttgttgttttgtttgtgcgtaattattggtttgtatgtttttatttggttaaagaaattagtaatttttaatttttattgtatatgagaagttttagaggagtcgttaaattaaaaaataaataaatagatagataataaaaagagagagatggattttagaatagtttaattagaattttagggggtgtaaattaattgggtattggggtttttataaagttatttaggtggtttttgacgtgtagttaggttgagaagtattgtatggaggaatatgattttatgaataaaggaagtttgatttatagttggtatcgttattgtttttaggttatttgtttagcgttgaatttgttattgagtttaggattagatttagggtaagtttaggtgattttttttgcgtttttatagatatatacgcgcgtacgtataatattttttgttgaattgtaaattttttttttgtgttaatttatgttgtttttaaggtaggggttatggtttttttttttgattattagggttagttttggagaagggttttttggaataaaagaaatatggagaggggtaaatagtatttttaggatttaggatatttgtgttttaggtttgtttttgatattatcgattataaattaataaatttgggttttagaatttttattggtaaagggagaggattagatttaatgattttttagaatttatttagtgttaaagttttgttattttattataaatgattagtgtgaagaatagagttttagtgttatgggttttgttgttagaagagtttggttaaattataaagtttggttattagttatgaagtttggttaaattataaagtttggttatatttaagaatgttttgaatgtaggagtatatttttttattttagaaaatttaatatttagaattaataagtgaatgaatgattattgggtagttttttattttttatggatttgaattagtttaattgtagtatttttagtgagggaaaattttttttattttaaataaaatgttgtgtttaggtagagtggtttatatttgtaattttagtattttgggaggttaatgtagaagttttttttgagtttaggagtttgagattagtttttataatatagtgatgttttatttttataaaaaagatgaaagttagttaggtttggtggtaagtatttgtagttttagttattttagaggtagaggtgggaggattgtttgagtttaggagttttagaaaagtttgagtaatataatgagatattatttttataagaaaataaaaaattaggtgggtttagtggtatgtagttgtagttttagttatttgggaggttaaggtaggagttttgtttttttaggttttgaaatttatttattttgttattttataaatgatagaattgagttgtttttatgagttgggttttgtatttcgttattgggaaaggattgaaaaggtaaaaatattttttataggtgtatagtatggtatagttttaagacgtagtttttttatttatatagcgtggttgagatgaatttatttattttttaattatattaaggatttattatgtttaggtattattttagattttggggatatgattatgaataatagtaataataaaagtgtatttttgggagttattttgttgtttaaagatttttttagattaagtagtttgtgtgtttgttattttttagttagtttatatatatttatttttttataggttttttattgcggcgatttattgagtgagtatttttggttttttatttgttaaagatataagagtgttaagtttaaaagtgcggagtgttaagataaggaatgttaagtttaaaggcgtagggaaggcggtttatttttttagtaataaatggaattagtgtatggaattagaagggtattttgttaggggaggtttttgtttgtttttttgaggaggtttttaggatagaatgcgaagagtagtttagatttgtagtttgaaatttcgaggaggttgtttggtaggaggttgggtttgtgtgggaagtttaattttttggaagattattagtattgaataggttagaagatagaggaaggagagtggagtgaagagaaaagagtagagaagggaggtaagaatttgagtaatggaatataattttttaagtgatggtattttaaaattagagtttatattattttggagaaggtttgaggaagatattatttggattttatattttttttttttagtttaatatagttaattttttttttttgttgaaaaggatgttttttttcgttgagtattagatgaagtagtttttttagttaagtgttacgttgtaggagaaagattgtttttagtataggtttggatgtatataaagtatagaggacgtttattttatatagaggttttttattgggatttgggagttgtatgtatttttatattttttatcgtagttagttgaggtggtagaagtttacggagttgaatgtgggtgtaattgtattgattgtttatattatttttttttttcgttggttagtagtagaattagatttgtttagtaaatgtatacgcgttgtaaattcgttataggatgagattggattttttggattaatgtttattggaaatttttatttaataataatttagattttatattagaatattttaattaaatgttttaaaaatgattataggaattatttgtttttaattgttttttttaaaatttatgggtattcggggttgggagagattaagatgtagtagggatttatggagaagaattcggtggtttgtggtttttagttttaattttattatttatgagttgtagtatttggggtaaattattttatttttttgtgtatggaggaaacgagtgagagaaattattagattttttaattataatttatgggtttattgttgtagattattattttttttgtttgttaaaatgaaaaagtgttcgtaaaagtgtttttttatttttagttttgggttttttcgggatttttttttttttttagtatttattttttttttttttttggattaaattaattaataagtaaatatttattgtaattaatgatttattttaaattaatttttttttaattttaagttttttatttttgtattgtagtttaattaataagtaaatatttattgtaattaatgatttattttaattaattttttttgatttttaagttttttatttttgtattgtagtttagttttttttatttttttttttttaaattttttaaaataagtatttgtatttaaaggtttattttatttttttttttttttattttgtagtgattattaagttttttttgaatttggttaaataagtttttaaaatttgttaggaaaaataatagtttttgtttttttatttttttatttttttatttttagaagttattattttttgtttttggagaattatttttattttatttttgttatttgtagattttatgtttttgggtaagttattttattttttttttttgtttttttatgtataagatatatataataatatagggttattgtgataaatatatgtgttaatatatgtaaagtgtttagaatagtttttggtatatagaaggtttttattaaagtgtttatttttatttttattgttattattattattattattattattattattattattattattttgttttattttttttggtattttgtatatttgatcgtagagaagtttagtaaatattggttgaagaattgagtaaatgtagatgtttttttttgaatttattttattttattcggttttattgtttggattttgttaggagggaaaaggggattttatttgttttatgattttaggtggagggattgttatttgggatttttatttaagtaaaagtaaattattttagttatttgtaagtatgtttggtttgtaatattatgttgtgagtaatgaaaattaaaaaaaaaaaaaattatgaaaggaaaataattttaaatgagggtgaagggtaggttatgtttaggatgtgtaataaattttttattttgaatataaatgaagagttgtgtaatgt

SEQ ID NO: 234 - DNA, 5987 bp, Artificial Sequence
  chemically treated genomic DNA (Homo sapiens)
tttttaatttgtattattttttttattttaataattttttttaatattttttataaagtagatttattggttatagaatgttttaatttttatttgtttgagaaaattttattttttttttatttttgaaagataattttgtagggtatagaattttaggttgtaggttttttttttttaaagtgaaatattttattttattttttttttttttgtatggtatttgagaagaagttagatgtaatttttattattattatttaaaagattgtttttgtttttttttttttttttttttttttttttttttttttgtatattatattttttatagttgttttatattttttagatattatgttttggtttttttttgtgtttttttttttgatttttagttttagaagtttttatttatatatttgtaatcgtagggatttttttttttgttatgtttagtttattaataagtttttatagatattgttgatttttgttttagtgtttttgatttttagtatttttttgattattttttggaattgttatttgtttatttatattattaatttatttttgtgtgttgttttattatagtaattgtagttgttttaattttataggtattgtaattttaatatttttattatatttgatattgattttgatgtttgttttgttttattaagttatgtttttgttttttagtgtgatttttaattttttgttgaaagttaggtatgatgtattgagtgaaagaaatttaatatattgtaatgtgacgataagagtttaggggaagtgaagtattttatagttttatagtaggtttcggttttttagtgagtttgtgtttatgaacggtgatttttaataagtgttttttattttattttttttttgtttttaagtgggataagattattgggggggggttagaattgggtattttttttttttaatgtagaagttaaagagagggttggagttgggtatttttttttttttgtatggaaagttagaggtagttaaatttggatatttttttttttttaatttagttaggttgcgataaaaatttcgatagtttaggttttaatattataaaataattttttttgagtataggttttattaagaatattatattttgatggagttgagggggagttttttttgatatttattgcgagaatttcgtagagttttaggaagtaaaatttataaaagtgtgggagttttttagaattttttttttgtagatttatttgtattgaatttttagaaatttattaattatagtttaggtttttttatttaggtattggtttttatggaggtttttgtttgtgtatttttgttttagtaagttgttttttttgtatggtttgttttttaaattttttaagtagggttatgatttgtcgttttatttttttgatagttttgagagtgttgattttttagtttgtttagatttttatttgtttttaggatgaagtgataatttttaagtttttttttgatatgttagattagaaattgaaagttttaagttttatattttgtgcgtgggtatgtttatattttgtttgttttagtgtttttattttatatttttttttttttttttgtttttttgtgagatttttaggtttaatataaagattgtgtttaatttatttaattattttggtttatttgagtattataatgaataattataaaaaaaaatgaagtaaaagaaaaatttattaaagaattgagatatttgagaaaaagaaaggagattagtgttttataaaatttagaaatagattttttaagtgtttttttattgatttatgtgaaaggattttttttaatttaataaattatgtgttttcgtttatagttttaaaattttttgtgtagttaagaatgggtaaataattaggttttattaaaggattaacgtaaagattttttgtaagtaatatttttgttatttaaggaagagataaattttatggtataattttgttaaagtatattaagaataattttgatataaagttttttttttagttaatatgttatgaaagaaagaagataaggggtgatttttattttttaagtgaattattaaatttattaaagaagaaacgagggaaatagaaagaggatttttgtttgagataatggatttgtatgtatgagtagtagaattttgtttaaagtataaggaagggaaaaaaaagttagtttatttggaattttggatattaagagtttttattgtttatttttttttaatttatatgaatggtttattattttaattaataaatattttatttttttttaatatatttatgaaataaatttgaaatgaatagtgtaatatgtgaatgtttagaatattataaaattaaatataaaatttgtttggtaatttttttagtattttaggaaaaaagttgataaaattttaagtagtagaagggggtagtaaaatttaatagaaagttttggaagatttttaagatttttttttattttttttttatgtagattattttttaataaattttagacgttaatagaaattttgtataatagatttatatatttgtttaaaatagatatagaaatattgaatatatgtaaatatgagagttataagttttatatgattaaattttttttttatggtatataatagttatagtatttttttatataaaataggtttagtggttttaatttagtttggtatatttaatatatttttatgattagtattttaaatgtatttattcgttttattttattgttttagaattgttagttatttaataaattatgtaatttttttttttatgtttagatttgtatttttttttaaaattttgtttatttttaaagttttagattttttttgaatttttttttttgattttttaagtatatggaattttttattttattttgttatataagtgatagaatttttattatgggatagatggagtttaatttttttgagtttaaaataatttaaatataattattttttatgttttgttttttttttatttttgtatttaaatttttttttagataatagaataattaatgtttgataaggaagataatgatgatgattattttaaaatgaatttaggattgtaatgtaaaattttagtatttttttatagtatggattttaatatggtttttaatttaaattaatattagtagttttaattataaattttaaattttagtagatgtaatttatttttttaaaatgaaatagaagattgaaattattaaattattaaaaagaaaatgatttacgtttttagttgaaattttatgtaagattttatgtaataaataggagtgttataaatggaatgatgaaatatgattagaggaggagaaaggttttttagatgagatggaattttagttattcgtgttttatgaagaattagatgtgtatattaagtaaaatagttaaaaaaaaaatttttaagtgagttttttatttattttttttttataagatttttataaattgaggtatttggtgtagttttattttaggttttatgttgttatttttttgtaatgttaaggatttaggatataattgaattttttattttttattttttttttggtgtgtgtgtatatatatatgtatatatatatatatatatatatatatatatattttttagtattttatttttatatgtttttttttgagtattatttatgatagatgttaaataaaagtaaagatgaaattttaattgttaaaattttttttttatttaattaattttttatttaattatgttttaaaacgagaatagaaaattagttttaataagtttaggtaattgaaaagtaaatgttatgttgtattttgatttatggttataatttataattttggaaaagtggatagaaaagataaaagagtgaattttaaaattcgaatttattttattagtattttttatgaagggttagtaattaaaataatttacgtattagggagagaaatgttttaaggtatacgttttggatatttagcgtttttgtaaattttggttatcgtcgttttttttgtttattagaaggtaggaaattttatattggtgattcgtggagtttatattaattatttatagggtaattgtttaggattagtattatgaggagaatttatttttttcgtttttttttttaagaaataaggagggggtgaaggtacggagaatagtattttttttgttgaaagtaatttagttataaagataaattatagttatgtatattgaaggtagttattttattttataaaataagagttttttaaaaagttatgtatgtatgtgttgtatatagagtagatatatagtttattaagcgtcgttattaaaatataaaatatgttagttttttttaattttattcgttttagtttgtttcgacgtgattttttcgattttttaaagacgtatagattagatacggcggcggcggcgggagaggggattttttgcgttttcggattttagggtcgtttagatttttggagaggaagttaagtgtttttttgttttttttcggtattttatttaaggcgattagtttagaattggttttcggaagcgttcgggtaaagattgcgaagaagaaaagatatttggcggaaatttgtgcgtttggggcggtggaattcggggaggagagggagggattagataggagagtggggattattttttttgtttttaaattggggtagttttttgggttttcgatttttttattttcgtgggtaaaaaattttgtttttatcgggtttacgtaatttttttaaggggagaggagggaaaaatttgtggggggtacgaaaaggcggaaagaaatagttatttcgttatatgggtttggtttttagttttataaaaaggaaggttttttcggttagcgattaattgttatacgatttgtagtgagcgttaggagtacgtttaggaattttttagtagcgttttttttagttttatagttagacgtttttagatagtaaagtttattttcgcgtcgcgttttgttcgtcgttgcgatgttcgttcgcgttttgttgttgtgcgcggttttggcgtttagttatataggtgagtatttggcgtcgcgtatcggggatttcggttttacgtattcgggtagagttttcgttttgattttttgggtttattttagtatttcgattttttttcgaatagagaagttacgtgatttgggaaagagtttggatcgttagagttcgaaagaatttcgtggatattttagtttttttataagtattgattattatgagttagttatttaatcgatttgagatatttttattttttaaatagggatagatgatattaatttgtaggttgttattatgataagataggatttgattaatatatgtgaattgtttatatttggaatttttttattgagtggaagaagttgttttaaatattttagttagtttttttttgtttttaggaaagttcggattatgttttaagataagtaaaatgttttaaaagtaagttgttttattttgaatttttttttaaatgttgattagtgtattagatttattttaatttggaaagtgaagtgttatttatttgaattttttaaaaatgttaattttaatatttaaagagttaattaagaaaagtttagtaatatgatgtattaagttgaatatgttgttatttttatttagaatagaaaattggtatttttacgttttatttattttaaggtaggttaaaaaattgtatttttatgattatttatatattttttgaatttattattgtaaagttgatttatagttaaataattaaatgtttaaattaagattaagatattagagaatgatttatttgttgttttttaattgtagt

SEQ ID NO: 235 - DNA, 5987 bp, Artificial Sequence
  chemically treated genomic DNA (Homo sapiens)
gttgtaattaaaggatagtaaataaattattttttagtgttttaattttaatttaaatatttaattgtttgattatgaattaattttataataataaatttaagaaatatataggtagttatggaaatataattttttaatttgttttagaatggataaaacgtagaaatattaattttttattttaaataaggataatagtatatttaatttggtatattatgttattaagttttttttagttaattttttagatgttaaaattagtatttttaagaagtttaaataagtagtattttattttttaaattaaaatggatttagtatattaattaatatttagggaaaaatttaaagtaaaatagtttatttttaagatattttgtttattttaaaatataattcgggtttttttgggagtaggaaagaattgattagaatatttaaaataattttttttatttaataaaaaggttttaaatataaataatttatatatattgattagattttgttttattataatgataatttgtaaattagtattatttatttttatttaggaggtgagagtgttttagatcggttaagtaattggtttataatgattagtgtttgtgggaaagttggaatatttacggagttttttcgaattttagcggtttaagtttttttttaagttacgtagtttttttattcggagagaagtcggagtattgggatagatttaggaggttagagcggaaattttgttcgggtgcgtggaatcggagttttcggtgcgcggcgttaggtatttatttgtatggttgagcgttaggatcgcgtatagtagtagggcgcgggcgagtatcgtagcggcgggtagggcgcggcgcgggggtaggttttgttgtttgagggcgtttggttgtggagttgaaggaggcgttgttgaggagtttttggacgtgtttttgacgtttattgtaagtcgtatgataattggtcgttaatcgagagaatttttttttttataagattgaaaattaagtttatgtgacgaaatgattgttttttttcgttttttcgtattttttataaattttttttttttttttttttaaaaaaattgcgtaagttcggtgggggtagggttttttatttacggaaatgagaaaatcggaaatttaggaagttgttttaatttgggagtagagggggtagtttttatttttttgtttgatttttttttttttttttcgagttttatcgttttaggcgtataggttttcgttagatgttttttttttttcgtagtttttgttcgagcgttttcgagagttagttttggattgatcgttttggatgggatatcgggggagggtagaaggatatttggttttttttttaggaatttgagcggttttgaggttcgggggcgtagggaattttttttttcgtcgtcgtcgtcgtgtttggtttgtacgtttttagagggtcgaggaagttacgtcgggatagattggggcgagtaaggttaagaaaggttgatatgttttatgttttagtgacgacgtttaataggttgtatatttgttttatatgtagtatatatatatatagttttttaaaaaatttttattttgtggaatgaaatagttatttttagtgtatatagttgtaatttatttttgtagttaagttgtttttaatagaagaaatattgtttttcgtatttttattttttttttgttttttggaaagagaggcgggaaaggtaaattttttttataatattggttttaagtagttattttgtaaatagttaatgtgagttttacgggttattaatataaagttttttgttttttgatggataaaggaagcggcgatggttagaatttgtagggacgttaaatgtttaaaacgtatgttttaaggtatttttttttttgatgcgtggattattttggttattagttttttataggagatattggtaaaataaattcgagttttaaagtttatttttttgttttttttgtttatttttttaagattatgagttgtgattatggattaaagtataatatagtatttattttttagttgtttgggtttattggggttaattttttattttcgttttggaatatagttggatgaggaattaattagatggaagggagattttgatagttggaattttatttttgtttttgtttaatatttattatgggtagtgtttagggaggagtatgtgagggtgagatattaaaaaatatatatatgtatatgtgtgtgtgtatatatatatatatatatatatatatattagaaaagaagtggaaaatagaaaatttagttatgttttaagtttttagtattataggaaaatgatagtataaaatttgaaataaaattatattaggtattttaatttgtagaagttttataagaaaaaaataaataagagatttatttggaggttttttttttaattgttttgtttagtgtatatatttgattttttatgagatacggatgattaaaattttattttatttaggaagtttttttttttttttagttatattttattattttatttatggtatttttatttattgtatggaattttatatgaaattttaattaagagcgtggattattttttttttgataatttaataattttaattttttgttttattttaaaggagtaggttgtatttattgaaatttgaagtttatagttagagttattaatgttagtttgggttagaagttatgttagaatttatattgtgagagagtattaaaattttatattataattttgaatttattttgaagtgattattattattgttttttttattagatattaattgttttgttgtttgaaaagagatttggatataaaagtgagggaaaaatagggtataaggaataattatatttagattattttaaatttaaaggaattgaattttatttattttatagtggaaattttgttatttatatagtaggatagagtgaagagttttatgtatttggaaagttaaaaaaaaaagtttaaggagaatttgggattttaaggatgggtagagttttagaaagaagtgtaaatttgagtataaggaaaaaagttatataatttattaaataattgataattttgagataataaaataaaacggataggtatatttgggatgttggttatgggagtgtattaaatgtgttaaattaaattaagattattaaatttgttttatatggaaaagtattgtgattattgtgtattataaaaaaaaggtttgattatgtaaaatttatagtttttatgtttgtatatatttaatgtttttgtgtttattttaggtaaatatatggatttgttgtataaaatttttattagcgtttgaaatttgttgggaaataatttatatgaaaagaaaataaggaagaattttaaaaattttttagagttttttgttgagttttattgtttttttttgttgtttgaaattttgttaattttttttttaagatgttaggaagattgttagatagattttgtgtttaattttataatgttttaaatatttatatgttgtattgtttattttagatttgttttatgaatatgttgaaaagaaatgaaatatttattaattgaagtgataagttatttatgtgagttaaaagaaaatgaataataaagatttttaatgtttaaaattttaaataaattaattttttttttttttttttgtattttgagtagggttttattatttatatatatagatttattattttaggtaagggttttttttttatttttttcgttttttttttggtgggtttagtggtttatttagagagtggagattattttttgtttttttttttttatggtatgttggttgaaaaaagagttttgtgttagggttatttttagtatattttggtaaggttatgttatgaagtttattttttttttgagtagtagaaatgttatttatagaagatttttacgttagttttttagtaaagtttgattatttatttatttttagttatataagaagttttgaggttataaacgaaagtatataatttgttaaattaagaaaagtttttttatataagttaatgaagaaatatttaaaaaatttatttttaagttttataaaatattgatttttttttttttttttaaatattttaattttttgatggattttttttttattttatttttttttgtgattgtttattataatatttagatgagttaaagtagttgaatgagttgaatatagtttttgtattggatttagaaattttataaggggataaggaagggaaagagagtgtgaggtgggggtattggagtaggtaggatgtgaatatatttacgtatagaatatgaggtttaggatttttagtttttgatttggtatgttagggaggagtttggaaattgttattttattttaaaaataagtaaaaatttaagtaaattgaaaaattaatatttttagaattgttagagaagtgaggcgataggttataattttatttaaaaaatttgaaagatagattatataagaagaataatttattggagtagaaatgtataggtagaaatttttatgaaaattagtatttgggtaggaaaatttgaattgtaattgatgaatttttggaggtttagtgtagataagtttgtaaaggaaaaattttggaagatttttatatttttgtgagttttgttttttggagttttacgaggttttcgtagtgaatattagagaaaatttttttttagttttattagagtatagtgtttttaataaggtttatatttaagagaaattattttataatattagagtttaaattgtcgggatttttgtcgtagtttaattgaattagaagaaggaaaatatttaaatttaattgtttttagttttttatataggggaagaaaaatatttaattttagttttttttttagtttttatattggagaagggaaatatttaattttagtttttttttagtgattttgttttatttaaggataggaaaagagtggaatgaaaagtatttgttgaaagttatcgtttataggtataggtttattaaaaggtcgagatttgttataggattatagaatgttttattttttttgaatttttatcgttatattataatgtattgagttttttttatttagtatattatgtttggtttttaataaaaaattagaagttatattaaaagataaaaatatagtttgataagatagagtaagtattagaattaatgttaaatatggtagagatgttgaaattataatatttatgaaattaaaataattgtaattattatgataagataatatataagaataggttggtaatgtaagtagatagatggtaattttaagaaataattagagaaatgttagagattaaaaatattggaatagaagttaataatgtttgtaagggtttattagtagattggatatggtagaggaaagaatttttgcgattgtagatatataaatagagatttttaaaattgagaattaaagaaaaaaatatagaagaaaattaaaatataatatttaagaaatatggggtaattataaaaggtgtaatatatagagaaggaaagaagggaaggagaagagagaaaggaatagaagtaattttttaagtaataatgataagaattatatttgatttttttttagatattatataaagaagaaaagagtggaatgaaatattttattttgaggggaaaaaatttataatttagaattttgtattttataaaattattttttaaaagtgaaggagaaataaggtttttttagataaatgaaaattgaggtattttgtggttagtagatttgttttgtgagaaatgttaaaagaagttattgagataagaaaaatgatataggttagaaa

SEQ ID NO: 236 - DNA, 5683 bp, Artificial Sequence
  chemically treated genomic DNA (Homo sapiens)
atggtaaatatttgaaaaagtttttacgttgaaatttaaattagattatatttaggatgttttataaggtggtattttttattaagatgataaaggataaatattggtggagttagagaggttgtttttaaatatagttttttttattagtaatattgtagtagtttgtatttatcgtttagagtatgaaaaagatttttgttaaagacggtttttggggatttattattattatatgttaagagtttgttttttatgtttttatttttttattttgttaattttttttatttttatttttcggtttagtgtgagattttattattttttttttttatttttttttttttatatttttggttttttagtaggttaatgtttttgtttttttattggaatttatttattttggttatttttttttttatgaatttgttggattatattttaaagttatttaaaagagggatataaagatataataaaatcggaaataacgtttatttttattagtttgtagttaagagtgtgtggaattagggtggttgtaggtaaagagatagggggaagggttgttttatgttatgggtaggatagtaaatggtgtaaattttttggaaagtattttagtaatataggtgaagagtttttataatgtgtttattttatgatttatttttattttttttattttaaaggaataagaagaggtttaattaaagtatgagtgaaaaggttatttaaatatagggaaaggggtcgttatgatgtttacggttttaagaaatagaaaataataatttggtttaaataataagtatataattaaagaaatttagaagtaggatttttttaagagttgagagatttagtagtttaaaaatgtgatttgatatacgagttttttttatgtttttgtttttttttttttaatattggttttatattaaatttggttttttagtggttaatagtattaaatagtatttatcggtatttttgttggtatttaaaagagatggagaaagtttgattttatatggtttttttttaaaagtaataaaggatttttttcggaagtttttagtaaatttcgttagatttgaattatatgttaatttttaaattagttattggtagggaagtgggaaaaaggggaggaggtgtttatttttaattaatatgtttatttttgtttattgagattaattttataaaagtattgttttagttttttgaagaggagtataatgtttgtgagttatttattatatttatttattaagagttaagggataattgagtaaaatggtagagttggtaggaaaatggtgagtagtttcgtttttttgtgttataattgatttgtatataaagagatttggaaatttaaatataagaattttttttttttaagtttagggttttgggtattttaagtttggtttttgtttgggtatagtggtttacgtttgtaattttagtaatttgggaagttaaggagggtggattatttgaggtgatgagtttgagattagtttggttaatatggcgaaattttaattttattaaaaaatataaaaattagttggatgtagtggtatacgtttggaattttagttatttaggaggttgaggtaggaaaatcgtttgaatttgggaggtaaaagttgtagtgagttgagattgtattattgtattttagtttgggagatagagtaagattttattttattttttattaaaaaaaaattttggtttttatatgtgaaaaaataaaagttaatttttaaaaattaaataataaagagtgttaggtgataagttttatgatagagataatgtgtgttttaaaatatatagtataaaatagatggaaaatattttatggagaagggagagtttgaattggtgtttgattgaaggataagaaaaatttgttggtaatttttttttggttttgatttttgatgtagttaaagtaaagtaatttagaattatgatttagggaatatatttagagagaaatgaatttatgatgtttttaatttgaagatgttatgattttagattattttagaatataatgattttttattgttttatatttgtaagaaatgttttattattgaaaatttgtaatatttaaaaaatttttatataaaattatagtttattttgttgttttatgttaaataaataaaatatttttttttaattatgttgttttttttaattatacgtaattttaaaattagttgtaattgatagttttttttttatatttattgttaatgtatttaggttaattttatttttaattagagaaatttagaaaaaggaaattttacggtgaaatgttatatgttttataatttttagtaattaatttttaaggatgataatttggtaaaaaagagaattggattagttttttgaaaggtttattatttcggtttatgttaattgattgttttaaaattatagtgtttttaggttgtagagatatatttaaaatggattattgtttttatattaaaggggataggtttttttttttttttttttatttttgttttttttaaagttgtatagaggtatatgaggtttggggaatatttgtagtatatgttggttggtaagaatgtgggtgaatttttgttaaggggcgtagatatttttttttttatgattttttttttttatttagaataattgaagtattatgataagaggaagggttttgtgtttgagataagtagtttttatatttgttagttttttttaataagaaagtttttttttgttatcgtataggttatttttttattggtaaagtatgatgaagtttggaaattgttgtttttgttttgttgaaagaagttaagttttaagaaatttgtagaggtatttttataattttttagttatggtagtatgaattttgaaggggtagtgagtgttggtttttattttgtttgtatagttaagtttaggggagataatttttttatataagatgtattttgtttttgtgggttttttgtagtttttaagtttttatttgatttgtatataatgatttagtgggttagaggagtttagagttatgagcggtttatttttttaagaattatttttgattgtttagtattatggagtaagtggaaagaagaaaaaaaaaatttaattatttttcgaagagtaagatgaatgttgtagaaggagaaggaaggggagggagatggatgggtgtcgattttagaatttttagatttgtttggatgaattattatttatgatttgcgggataagaatttgattttatttattaattagtagaaatttttttttttgttttttaatatttgaaatttaataaatatgtgttttaggaatatatcggttattttttagaggtattttatatatatattgagtaattagaaaatatttttttcgtaatatatatatatatatatatatatatatattattttgttatataatatttttacgtaagaaaagcgaaattgttgtttgatgaatgtaaatatttggttgtttgtagtagtcgggagttttgttaggtttaagtgttaagatgggaggtgaattttaggggtttttttttgttcgtgttgagatttttatttggttaagtttttatttatgttttggtttcggagcgagttcgatagcgttggattatagtagagggagcgaggcggttgacgttttatttcgaagagatgaatggaattttaggaagttagagttatgttggtttgggatagtggtttggagattagattttaatgatagaagtattaggtagcggtatttatggtaatgtgtgtatttatagaaatgtaatttatatttcgggtttaggagtcgaaaaatgaaaagaacgtttagggaggaaaaagggaaatataataataggtagagagtaatttattattttatgggtttgttttgtaaatagttgaagattttggagttagatggttttgtaaattttttaaataggagttacgttaagaagtacgagtgggtataaaaattgttttttaagatataattttaatttggtttgtggaaattggatacgagtaagtttttttaaaattcgagtagaaagtagttgtttttttcgggttttttgatgagaatacgtatatcgtttttaagcggtcggtcgagggagcgtcgcggtagcgggagaggcgtttttgtgggttttttggtagtcgcggtaggaaagggttcgaaggtagcgaaggcgaacgcggcgtattaatttgtcggtttcgtcgacgtcgcgtttattttttttcggggcgggcgtggggttagtttaggataggcgttcgggggacgcgtgtttttattttacggggacggtggaggagagttagcgagggttcgaggggtaggtattttaacgaatggtttttttggtgttttttgcgtttcgtcggtttatttttttttttataaaacgggtttagtttttagtatttatttttcgttattaattaggtatttcgggagattagttcgttcgaaagtttttgcgttatttcgcgggtttttttaggtggtttttttagtttcgttttttttcgggatgtttgttgattatttcgagttcgcgtggcgtaagagtacgagcgtcgagttcgtgcgcgttaaggttgcgtgggcgggtatcgatttttttgagaagttttagtgtttttaagtttcgattttcgttttttttattttttagttggaaagttgcgcgttaggtagcggggggcggagagaggagtttagattggtttttatttttcgttttttgttcggtcgtcgtttattggtcggaggaatttttaggaatgcgagcgtttttttaaaagcgcgcggttttttcgttttgttagtcgttgcgttcgagttggtttgcgagtttagggtttttgtcgttttttaggagtaatttttatttcggacgtataggtatttttcgcgtttttttagttttcgtcgttttcgttatcgttttcggtcgtcgcgtttcggtatatataggtaagtcgttttcggcggtcgtcgaggattaaagttgttcgggatatttatttggagcgttgaggttttagtttttttggtggatttcggaatttatatttttttcgttcgtttattttagttcgttttttttagtcgttggaggattttttagggtaaggttttagagttattttttttagttttgaggtttataaattaatttattaggatattttaagatttttttattttttgaagttttttttaagtttttgtattagtattttagggaagagtttgtattttttttgttttttttgtaattttaaattatagtttttgattttgtttattttcgattttttaaaagtttttaaattgttggttttgcgttttttatattttaaaattagtattttttttttttattttttttttttttttttttttttttttttatgttttttggaaagtaattttgttgttttttattttagtaaacgcggggttaaagagggatggtttcggttttgtttttatgtttagtttcgtttttgcgtatcgtttttttttgtttagttgatttttgattttcggtttttgtgttttttgttatagg

SEQ ID NO: 237 - DNA, 5683 bp, Artificial Sequence
  chemically treated genomic DNA (Homo sapiens)
tttgtagtaggaagtataagagtcgagggttagagattagttaggtagggagggacggtgcgtagaaacggggttgggtatggggatagggtcgggattatttttttttgatttcgcgtttgttgaaatgaaggataataggattattttttagagagtatgagagagagagagagagagagagagagaggtggaggaaagagatgttggttttaaagtgtggggggcgtaagattaataatttgggggtttttgggaagtcgaaggtgagtaagattaggaattgtagtttggggttgtagggagggtaggggaagtatagatttttttttggagtgttgatataaaggtttaaggaggattttagagagtaaggaaattttggggtgttttgatgagttggtttgtgaattttaaggttggagaggatggttttggagttttgttttgaagagttttttagcggttgagaggagcgggttggggtaggcgagcggggagagtgtaggtttcggggtttattagagggattgaagttttagcgttttaggtggatgtttcgggtagttttggttttcggcggtcgtcgggggcgatttatttgtgtgtatcggagcgcggcggtcgggagcggtggcgagggcggcgagggttggaggggcgcggggaatgtttgtgcgttcggagtagaggttgtttttggagagcgataggagttttgaattcgtaggttagttcgggcgtagcggttggtaaggcggaggagtcgcgcgtttttaaaggggcgttcgtatttttggggattttttcggttaatgggcggcggtcgggtaggaagcgggaggtgggggttagtttgggttttttttttcgtttttcgttgtttggcgcgtaattttttagttagaaagtgaagggggcgggggtcggggtttgggagtattagaattttttagaaaagtcggtgttcgtttacgtagttttggcgcgtacgggttcggcgttcgtatttttgcgttacgcgggttcggggtgattagtaagtatttcgaaaagggacggggttggggagattatttaggagggttcgcggggtggcgtaggggttttcgggcgagttgatttttcggaatgtttggttgatggcgagaggtggatattagagattgggttcgttttgtaaaaagaaaaatgggtcgacggggcgtaggggatattaagagagttattcgttaaagtatttgtttttcgggttttcgttgatttttttttatcgttttcgtggggtgaggatacgcgtttttcgagcgtttgttttgagttggttttacgttcgtttcggagggaggtgagcgcggcgtcggcggggtcggtaggttggtgcgtcgcgttcgttttcgttgttttcgggtttttttttgtcgcggttgttagggggtttatagagacgtttttttcgttgtcgcggcgttttttcggtcggtcgtttgggggcggtgtgcgtatttttattaaggggttcggggaggatagttgttttttattcgaattttaaggaaatttattcgtatttagtttttataagttaaattgaaattgtgttttgaaaaatagtttttgtgtttattcgtgttttttaacgtgatttttgtttggagaatttgtagaattatttggttttagagtttttagttatttatagagtagatttatagagtaataaattattttttgtttattattgtattttttttttttttttttaaacgttttttttatttttcggtttttgaattcgaggtgtgggttatatttttgtgggtgtatatattgttatgagtgtcgttgtttagtgtttttgttattgaagtttggtttttaagttattgttttaagttagtatgattttagttttttggaattttatttattttttcgggatgggacgttagtcgtttcgttttttttgttgtgatttagcgttatcgggttcgtttcgaggttagggtataggtagaagtttgattaaataaggattttagtacgggtagggggaaatttttggggtttattttttattttagtatttaaatttggtaggattttcgattgttgtaaatagttaagtgtttatatttattaaatagtagtttcgttttttttgcgtgggagtgttgtatgataagatggtgtgtgtgtgtgtgtgtgtgtgtgtgtattacggaaagagtgttttttagttatttaatatgtatataaaatgtttttaaaagatgatcggtatgtttttaaggtatatgtttgttggattttagatgttgggaggtagaaagaaaagtttttattggttgatgaataaaattagatttttgtttcgtaaattataggtaatgatttatttaagtagatttgaagattttggaatcggtatttatttatttttttttttttttttttttttttatagtatttattttgtttttcgaaaagtaattgggtttttttttttttttttttatttgttttatgatattggatagttagaaatagtttttggagggatgggtcgtttatggttttgggtttttttggtttattggattattgtgtataaattagatgggggtttgagggttgtaagaggtttataaaagtagaatgtattttgtatgaaaagattattttttttaggtttagttgtgtagatagagtagaaattagtatttattgtttttttaggatttatgttgttatggttgagggattgtaggaatgtttttgtagattttttggaatttggttttttttaataaaataaggataatagtttttaaattttattatgttttattaataagaaggtgatttatacggtggtaggaaagagtttttttattagagaaagttgataggtataggagttgtttattttaaatataaagtttttttttttattatgatattttagttgttttgggtggaaaggaaaggttatagaagagggagtgtttgcgttttttaataggaatttatttatatttttgttagttaatatgtgttgtaaatattttttaaattttatatatttttgtgtagttttgagagaagtagggatgggaaaagggaaaagaaaatttattttttttaatgtgagggtaatagtttattttgagtgtgtttttataatttggaagtattgtgattttaaggtaattaattaatatgggtcgaagtgatggattttttagggagttggtttagtttttttttttgttaagttgttatttttgaggattagttattgaaaattgtaaggtatatggtattttatcgtaggattttttttttttaagtttttttaattggaggtgggattgatttaaatatattggtagtaagtgtgaggaaagggttgttagttatagttagttttaaaattgcgtgtaattaaggagagtaatataattgagaaaaaatattttgtttatttagtatagaatagtaaggtgggttgtgattttgtgtaggaattttttaagtgttgtaaatttttagtagtggaatattttttataagtgtgaagtaatgaaaaattattgtattttagaatagtttaaaattatagtatttttaaattgaagatattataaatttatttttttttgaatatgttttttagattataattttaagttgttttattttaattgtattagaggttagagttaggaggaagttattaatagattttttttgttttttaattaaatattaatttaagtttttttttttttatgaggtgttttttatttgttttatgttgtgtgttttaaagtatatattatttttattataaaatttattatttaatattttttattatttagtttttaaaaattagtttttatttttttatatgtaaagattagaatttttttttggtggggggtgggatggagttttgttttgttttttaggttggagtgtagtggtataattttagtttattgtaatttttgttttttagatttaagcgatttttttgttttagttttttgagtagttgggattttaggcgtgtgttattatatttaattaatttttgtattttttagtagagttggggtttcgttatgttggttaggttggttttaaatttattattttaggtgatttattttttttggttttttaaattgttgagattataggcgtgagttattgtgtttaggtaaggattagatttgaagtgtttaaagttttgggtttgggaagagagagtttttatgtttaaatttttaaatttttttgtgtataagttaattatggtatagaaggacgggattatttattatttttttattagttttattattttatttagttattttttagtttttggtgggtaaatgtggtgagtgatttataaatattgtatttttttttaaagaattgaagtaatatttttatggaattgattttagtgggtaggggtaggtatattggttaagggtaaatattttttttttttttttttatttttttgttagtgattgatttaggaattggtatgtgatttaaatttgacgaggtttgttgaaggttttcgggaaaagttttttgttgtttttaaggaagagttatgtgaaattaggttttttttattttttttggatattaataagaatgtcgataagtgttgtttggtgttattggttattggggagttaagtttagtgtgaaattagtgttggaggaggaagaataaaagtatagaaagaattcgtatgttaggttatatttttgagttgttaaattttttaatttttaagggaattttatttttagatttttttggttatgtgtttattatttaagttaagttgttgttttttattttttagaatcgtagatattataacggtttttttttttgtgtttggatggtttttttatttatgttttgattaaatttttttttatttttttagaataagagaagtaaggataggttataggataaatatattgtaaaggttttttatttatattattaagatgttttttagaaaatttgtattatttattgttttgtttatggtatgaggtagtttttttttttatttttttgtttgtagttattttagttttatatatttttaattgtaggttggtaagggtgagcgttattttcgattttattgtgtttttgtattttttttttgggtaattttgagatgtagtttagtaggtttataaagaaaagaataattaggatggatggattttagtgaaggggtaggggtattgatttgttaggaaattaagggtatggaggaaagaagatgggaaaaggagatggtgaggttttatattgggtcgaaagatggaaatggggaagattagtaaggtaggaaggtgaggatatggagaataggtttttaatatgtaataatgataaatttttaaaagtcgtttttggtaaaagttttttttatattttggacgataggtgtaggttattgtagtgttgttgatggggaggattgtatttgggagtagtttttttggttttattaatgtttattttttattattttagtaaaaaatgttattttatggggtattttaaatatggtttggtttgggttttagcgtggaagtttttttaagtgtttgttat

SEQ ID NO: 238 - DNA, 7833 bp, Artificial Sequence
  chemically treated genomic DNA (Homo sapiens)
gtttttggtgagatatgtgttttataagttttaatggagaaaaatgtaagtattttattttttgaaatttggttatttgagtaatgagaaaatagttattttttttaggatagtggtttttaattatggttatgtgtttttttaggaaaattttaaaaatatatatatattaatgtttttgtgttatttttagggattttaagtttttgaatacgaattttgtattagtattttttaattatttaggtgattgtgatgtgaaattatgattgagttttattgttttaagatgaaataaattttttttagtattgaaattataaatttaaattattaaaattaattaagggtatgggaattaataaggtatagggaagtttttatattataaaattatttttttaaattatagtttattgtttatatgttatttgttattgtagaaaagggtgaaaaaatagtaaatttaattatttttagtttgaaaaattatttagaaatgaagatgacgattttgaaatattgttaatattatttgatttataaataatgttttaatatatttattatatattgatagatatttttttatatgaatattatatattaaaattaaggtaataatgtatttagaatattttatttatatttatgtattttaagtaggttagaaattaagatatgagttattaagtatgagatgttaaggtgtggggttagaaattatattgtattttattattaataattaatatatattttaatattatatatatttaattttaatttgtatatttttaattatttttaattatgtgtataaatataagtatatatatttttatgtatttatttatttatatttttatttatttatttatataggggatttttttaaatttattattattaaattatatatttttattttaatttttagaataagtttaggaggtaggtattgttattatttatattttataaatgaggaaattgtttatagttataaagttattgtgttagatatattagaagtttaatatatatttggtgaatatatgtataaaaatagagagatagatatgtataatagtttatttttatattgagtaaaagtttttaatttgttttagaaatttttttgtgaaaattgagtaaaaatcgaggtatttttttatttgttatataggtataggtggtattttatttttttaataaggatgaatattgaaatgtggattttaaggtttaattttagattttttgaatttttgatagtgggatttggaatttgtttattgttttaaagttttttaaggaatttatatgattaattaggtttagaaattattggattttattgtcgaagtttgagaattaaagtttgggttttattgcggttttatagaaagggtaaatgaagtattatggatagaattgatacgtttttagttagtttttttttttagaagttaataggtagtaatatagtagaaattagtgatttatgttttgtgttttgaagttaggtagaattttatagagttttagtagtgttattgacgagatttgttttttggggtaagttgtttgatgtttttaaagttatattttttttatataaaatgagataatattttttgttttataggggtgttttaaagattaaataaaaataatatgttttattttatatggtataatgtttgatatttaagaagtaaaggatatattttatttttattgaagtaattagaaagtatgaaattatgaaggagataagagttttgattggtagtgtattttatttttttaggtttatttatttattttaaattatttttgttggagaataatttttaagttttttatttaagttgtgagtaattttatattttataatgatgttttttttatgagaaaaaaaaatgtttttaagttttttggagaaaatatatttgtattatttttattgaaaaatttaataattggattttgtttttttgtattaattttagagtgtatatgttataaataaagtgttttagtttaagaagattgaaagtaaatatggtatagtattttaaaataagaattttgtaaatatatggtatgattgtgttatattattagtaattatatgatacgtaatgtaaagtatagtttatagatttaaatttaattttaataagtaaattgattttgttttgttggggaaaagttaaagtattaatttaattgttaatgtagttttgtttatttttttggtatttagtgataagtttaaataatgtatatatttttatttatatatttagtaatataattttttgtttaatgagtgatgtttttttgttatttggtggtgtttgttagttttagaatttgttttttggtggtattataatattaagtatagagtaagtgtaataaaattgtagtatttttattgaaaaggttttgttttaaattgtttaataatttaaaggatttttgtggaagtaatcgtatttgttaattagttataattagtaattaatttttttggagttttaatttatttttggtaaaacgttttaggaagagtatatattattagaaagtatgttaaaaatttatttagtagaaaatttaaaaatagtttttttttgttaagaggttttttaaaattttatttatatagttaaattttgaaattttagtaggttttgttttattattataattattgtataaatatttttaaggattttgtttttagttttaagtatgatttatttttataagtttgattagttattatattagttttgttatggaaaatgatatgtttttattttttgttgtagagttgttaaattttgatttatatttatgttgttttttttgttgaaagtttgtagcgaaagaaatttttaattttttgttttgtaatattagttggtagttttatttaatgggtattttgtttttttaaagaatttagttgttttgtttagaagtcgattttttgatgtttttaacgtttggtttaattgatttgttttaatggagttttcgtcggtgaggagcgagatgttatcgattagaatgttgggatttgttgtttaattgttaggagtgagagatattgagatttagaaatttttggaggtgggaggggagagggatagtttcggacggaggcggagatgtaagataaagggatggattttatataggaaaaaaaaaaagatttcgttgaggtattgaggtgttgtacgattatattttttaaaggagaagttaaaaagtaaggaagtgggaggaggttggaggttaaagtatttaaaaggattattcgggtataatttgtttttttgttggtgtttgtaaaggatagatagtttcgtttttaaagtatatgaatgttttttttaagtgattgggaatggatattaattgtttgttaaatgttattaaatgtttttttaaatttaggggatatagaaagaggggtataaaaggagaatttaaatagaaaaagggaggattcggaggtttttgaaagcggggggagaagaaggaggagggataatagagaggaatagagaaggagagcggagagaagataaataaaaataaaaataggaattattgaataattatatattaaaaagaaagtttttttttatggggtatttaaaatattgagattgtaatagtgatttcggttatggaagaaagatgtttttttttatttttgttttcgaaagtttttggtttcgttattggcgattaaaattttattaggttaaagagtgtgtttaattgtttgaagaatgtagtagacggaaggcgggtttcgttatgtcgtttgtttttttcgttggagagaatgaaagaaacgcgtagagttagagatttttgtcgagttagattttttttcgtcgttttaggttatcggttattcggtaaagattcgagtaaggaacgtagggttattgtttgggttaataaatggagttcgttttttttttttcggacgtcgttgttcggtcgatgttttcggtaatttattcgcggcgtatgtagaggagttttttttttttttttagattatttgtttcgattaatttgattttttaaatatatttgatcgtattttttaggtggatatattaataggttacgggttggagaggagcgggtgatgaggagagggatttaaatttgcgaacgtttgggttgggtcggagttgcggggggtttgggaggagagaggggagaagagagaaggaaggagagcgtttgtcgggatggttgagttgtttcggcgagtagttttggggttgtacgtttttgtgggagatgttgttgttgtttttaggtcggtaagagcggttttaatattatcgttttttatttttttttttgtaaatttttagagaaacgtttttggttttttcgtcgcgatatttttagtttgtatttttttatagtttaggcggcgcgttttcgtacgttggagcgtcggtcgttagtaggacgttttttttcgcgtcgattcgtttttttttgttttgttgttgttgtttttttgatattttcgtttttattatttttagttcggagagacgttatttagtcgcggttcgtattcgcggttcggggttacgcgcggaagaggggcgttagttcggatttcgttttcggtagggggcgttttggagcggagagtgaggcgaatggtatatgagtgtgcgggtagtttattttgaagttcgagttttttatttgagttatgtttcgtttagttttattcgggttagcgtttggcgagcgagtttatttgtggttttcgcggtcgttttttttttgtatttttgtatttattcgtcgatttttttttttcgggatttgtattttgttttattaattagagttcgattgtttttttttacgtgatttcgggcgggttgaggatttgttgttttttaaacgttagagggatgcgggcggtagagttcgagaggcggttgtcgggttgcggggcgttttgattttttttttattttgttttttcgggttttattcgtttgtttttggattttcgtttttttttgtttttcggttttttagagttttttttttatggtagtagtttttcgcgttttcggcgtagttttttagcggacgattttttcgtttcggggttgagtttagtttttggatgttgttgaaattttcgagattatgcgcgggtttggttgttgttttttcgtcgggtgttattgttatcgtcgtcgtttttgttgtcgtcgttcgcgggatgtttagtagttcgttgttcggttttcgcgattttgtgtttttcggaagtcgtttgttgttgtagagttgtacgaattagttatggtgttgtgggagttttcgcggtagtgtagtagttggatattttgcgagggtttttgttggttgttgttgttgttcgttatgttatttatcgtagttcgttcggtgaagttcgttgttttttttatttttttaagtgattgttaaacgtttatcggttggaattgttttggtaagtttagaattttcgttttcgattttttaatttcgtagaagaatacgcgtatttagtatagattagtttattttagcgcgtttttttagttttttattttttattgttttagatttttaatattatttatttttatttagagaaataaggggaattgttgtaggttcgggggtgaggggtggttttgggatgggtagaaagtgtaggtgtagtaggaaatttttgtatgtttgcgtttatattggagttgcgaggattttgagaaatattaaacgggatggttttttgggtttattgttttgaaagagtattaattttaggggaaatattgaaatagaagttttgttattattaaagaaaaaagttttattaggatgaggaagaaataattttatgagaaagaatgagcgagaaagtaataaattaaatggtgattgtaggggaatcgttgatttttggtaaaggtgttatgaggtcgtattggtttttcgttgaagattaggttatatagattttagaggagttgggttttaatagaatttttttttttttttttttttttttttttttttttttttttttttttttatttatttattttttttttttttttattttttttttttttaggcggtaaaagatattggttttgtagtttagatatgtttttttttttgtttttttaagttttaaggtagtataggggagttgagaaaaagaatattttgcgggttttttaggtcggagtgggtatgattgaggttggttaggttttatgtaggcgagtcgagggcggaatcgattttagtgggcgttgatttttttatttttggataggtttttgtggagtgggttaggtattttttttgttcgttcgggtttttttagattttgacggcgaacgtttggtaggtttcgttttgttgaagttttttaattaaatagggttagaggatgggagttgttgtatttttagttggtatagtattcggtttgatagtttgtagtatagggtgtatgtaattttttattttttgtgaatataattttgttgtagttaaatttggttttgaataaagtgttttttaaagatgtatataagttgaagtgtatgtaattttagagaggagggaatgattaattgtaatttagggtgaaagtttgtatagtttttagttattattgatgtaaatgttaaaaggaaaattattatgtattattttaatttattttttataaagataagttgagatatgtaattttattagatttgggttaatagattgtttttttttttggtagtttttaaatttggtattttaataaaatttaatatgtttttataattttttgatttatgcgtatatgtgtgttgtttttgaaagaataagttttattttgttattgtttaattattttttagatgttttattatggtaataattatgagtttgtaaaaataatttttggaaatgttgatggttttgtagtttaatatagattggtttgttttatttttagtttttgtattgttttaggaaataattaatttaaatgtgaagttgatatttgtaattaagaaattatatatttattagatattttaaaggggattgtataaattaaagagaataaattggttttgtagataggttgttaagaatttggtatttcgtttttatttttgttaatttagaggtgattaatttttatttgagttaaatagattattatagaaaatattgtgtttgtttatttttattattgaggttttgttttttttttgtttggatatattttaaataaggggttgttttagtcgttgaagtaaaagaataattaaagatggggaaatggtaaaagggtatttagagattattattagtttttttttaaaatgtggagttttgtggttataaatattgtttatttaatgagtaaaaaataaaaataaaaaaaaaataggaagtaaatgttaagtttttatttattattgttagtattaacgtaagttttaaaaaatagtattattagaaaaggatattaaaggagaattgattagaaaagaattgtggaaaatggaaacgaatattgattatttaattagattttgaggttattagtagatagtgattttgtagtatagttatagttgttggatttaaaatttaggataagtattttaaagttttaaagtagtgtttttttttgttaaaaatttgtaagatgttttaatgattggagtgttttttttgaatttgagg

SEQ ID NO: 239 - DNA, 7833 bp, Artificial Sequence
  chemically treated genomic DNA (Homo sapiens)
ttttaaatttaaagagaatattttagttattaaaatattttatagatttttaataaaaaaaagtattattttgaagttttaaaatatttgttttaaattttaaatttaataattatagttgtattgtaaggttattgtttattgataattttaaaatttagttaagtgattaatattcgtttttattttttataatttttttttagttaatttttttttagtatttttttttgatagtgttattttttaaagtttgcgttaatattgatagtggtgaatgaaagtttaatatttgttttttgttttttttttatttttattttttgtttattaggtggataatatttatgattataaaattttatattttggaaaagagttagtgatgatttttgaatatttttttattatttttttatttttaattgtttttttgttttaacgattgaaataattttttatttgaaatgtatttagataaagaggaaataaagttttaataataaagataaataggtatagtgttttttgtgatggtttgtttggtttaaatgaagattgattatttttaagttaataggggtggaagcggggtgttaagtttttgataatttatttgtaaaattagtttattttttttagtttatgtagttttttttaaaatatttggtaaatatgtaattttttgattgtaaatgttaattttatatttaagttagttattttttaaaataatgtaagggttaggaatgaagtaaattagtttgtgttggattataaagttattaatatttttaaaaattgtttttgtaggtttataattattattataataaagtatttaaaaagtgattaggtaatagtaaagtgaaatttatttttttaaaaataatatatatgtacgtatgaattaagaagttatagaaatatgttgagttttattaaaatgttaaatttagaaattgttaaaaaagagaataatttattgatttaaatttaatagggttgtatattttaatttgtttttgtaaaggataaattagaatgatgtataataattttttttttggtatttatattagtaataattaggaattatataggtttttattttgagttatagttggttatttttttttttttaaagttatatatattttagtttatatatatttttgaaagatattttatttagagttagatttaattatagtaaaattatatttatagaagatgaaaaattatatatattttatattataggttgttaaatcgaatgttatgttagttaggagtgtagtaatttttattttttggttttatttaattaggaagttttagtagagcgaagtttgttaagcgttcgtcgttagaatttgaaggaattcgagcgagtaagaagagtgtttgatttattttatagaagtttgtttagaaatggaggagttagcgtttattgaagtcggtttcgttttcggttcgtttatatggagtttgattagttttagttatgtttatttcggtttgggagattcgtaaagtgtttttttttttaatttttttgtattattttgaagtttagggaagtaaagagaggggtatatttggattgtaaaattaatgttttttgtcgtttaggagagaagggaatgagagagagagagagatagatagatagagagagagagagagagagagagagagagagagagagagagagagaaattttattgaaatttagtttttttagaatttgtgtgatttggtttttaacgggagattagtgcgattttatggtatttttgttaggaattagcgatttttttgtagttattatttgatttattgttttttcgtttatttttttttataaagttattttttttttattttagtaagatttttttttttaatgatgataaagtttttgttttagtgttttttttaggattggtgtttttttaaaatagtgaatttagaaaattatttcgtttaatattttttaaaattttcgtagttttaatgtaagcgtaagtatgtaaaggttttttgttatatttgtattttttgtttattttagaattattttttattttcgggtttgtaatagttttttttgtttttttggatagaggtgggtggtattaggggtttagggtagtaggaggtgaggggttgaggaggcgcgttagggtaggttggtttgtgttggatacgcgtgtttttttgcggagttaaagggtcggggacgggggttttggatttattagagtaattttagtcggtgggcgtttggtagttatttaaggaggtagggaaagtagcgagttttatcgggcgggttacgatgagtagtatgacgggtagtagtagtagttagtaaaagttttcgtaaagtgtttagttgttgtattgtcgcggggatttttatagtattatgattagttcgtgtaattttgtagtagtaaacggttttcgaggaatataggatcgcgggggtcgggtagcgggttattgagtatttcgcggacggcggtagtagaggcggcggcggtggtagtggtattcggcggggaagtagtagttaaattcgcgtatgatttcgagagttttagtaatatttagggattgggtttagtttcggagcgagagggtcgttcgttgagaagttgcgtcggagacgcgggaagttgttgttataaggagggagttttgggaagtcggaggataggaggagacgggagtttaggggtagacgagtggagttcgaggaggtagggtggagggagagttaaggcgtttcgtagttcggtagtcgtttttcgagttttgtcgttcgtatttttttggcgtttgggaagtagtaggtttttagttcgttcggggttacgtgggaagaggtagtcgggttttgattggtggagtaggatgtaggtttcgggagggaggggtcgacgagtaggtgtaaggatgtaaggaggaggcggtcgcggaagttatagatgggttcgttcgttaggcgttggttcgagtggggttaggcggggtatggtttaaatgagaagttcgggttttagggtgggttattcgtatatttatatattattcgttttatttttcgttttaggacgttttttatcgaaggcggggttcggattagcgtttttttttcgcgcgtgatttcgggtcgcgagtgcgggtcgcggttgggtggcgttttttcgagttggagatggtgggggcggaggtgttagaggagtagtagtagtagggtagagaggggcgagtcggcgcgggagagggcgttttgttggcgatcggcgttttagcgtgcgggagcgcgtcgtttaggttgtagggggatgtaggttgggaatgtcgcggcggagaggttagggacgtttttttagggatttataggaaagagggtgagaggcgatggtgttagaatcgtttttgtcgatttggaagtaatagtagtattttttataagagcgtgtaattttaaggttgttcgtcgaggtagtttagttatttcggtaggcgttttttttttttttttttttttttttttttttttttaggtttttcgtagtttcgatttagtttaagcgttcgtaggtttgaatttttttttttattattcgtttttttttagttcgtagtttattagtgtgtttatttgggaggtgcggttagatgtgtttggaaggttagattggtcgggataagtggtttgagagaaagagaaaggtttttttgtatacgtcgcgggtgggttgtcgggagtatcggtcgggtagcggcgttcgggaaggggagagcgggttttatttgttggtttaggtagtgattttgcgttttttattcgggtttttgtcggatggtcggtgatttggggcgacgagagaaggtttaattcggtaggagtttttggttttgcgcgttttttttattttttttagcgggaagggtaaacggtatagcgggattcgtttttcgtttgttgtattttttaggtagttagatatattttttagtttaatggaattttagtcgttagtaacgggattaagagttttcggggataagggtggagaggaatattttttttttatgatcggggttattattgtagttttagtgttttggatgttttatagggaagagttttttttttggtgtgtgattatttagtgatttttgtttttgtttttgtttatttttttttcgttttttttttttatttttttttgttattttttttttttttttttttttcgtttttaaaagttttcggattttttttttttttatttaaattttttttttgtgtttttttttttgtgttttttgaatttaggagagtatttgataatatttaataggtaattagtgtttatttttaattatttaaaagaggtatttatatattttgaaaacgggattatttattttttgtagatattagtagaaaaataaattgtattcgagtaatttttttaagtattttaatttttaatttttttttatttttttgttttttaattttttttttgagagatgtgatcgtgtagtattttagtgttttaacgaaattttttttttttttttgtgtgaaatttatttttttattttatattttcgttttcgttcgagattgtttttttttttttttatttttaaagatttttgaattttagtgttttttatttttggtaattaagtagtagattttagtattttagtcggtggtatttcgttttttatcgacgaagattttattaaaatagattaattagattagacgttggaggtattagaaaatcggtttttagatagagtagttaaattttttaaggaaatagaatatttattagatagagttgttaattaatattgtaaaataaggaattagaaatttttttcgttataggtttttagtagagaaggtaatataaatatagattaagatttaataattttatagtagagaatgagaatatgttattttttatagtaaggttggtgtggtaattaattaggtttatgaaaataagttatgtttgaaattaaaggtaaagtttttaaaagtgtttatgtagtaattatgataatgaaataggatttgttaggattttagagtttggttatgtaagtagaattttagagaattttttagtagaggaaaattgtttttgaattttttgttaagtaaatttttggtatattttttaataatatatgttttttttaagacgttttgttaaaagtaagttaaaattttaaaggagttaattattggttgtaattggttaataaatgcggttgtttttatagaggttttttaaattattaaatagtttgaagtaaagtttttttaatgggaatgttgtaattttgttgtatttattttgtatttagtgttatagtgttattaagaaataaattttgaaattggtaagtattattaagtggtagaagaatattatttattgagtagagaattgtattattgaatatgtaaataaaaatatatatattatttagatttgttattaggtattaaagaagtagataagattgtattagtaattggattagtgttttaatttttttttagtaaggtaaaattagtttatttattagaattaaatttaagtttatgaattgtattttgtattgcgtattatatgattgttagtaatatgatataattatattatgtatttgtaaaatttttattttaaaatattatattatatttatttttaatttttttgagttagaatattttatttgtggtatatatattttagaattgatgtagaggagtagagtttagttgttagattttttagtagaaatagtgtagatatattttttttagaaaatttaagaatattttttttttttatggaaagaatattattataaagtgtgagattatttatagtttaagtagggggtttgggagttattttttaataagaatagtttaagataaataaatgaatttgggaaaataagatatattgttaattagaatttttattttttttatgattttatattttttgattgttttaataaaggtaagatgtattttttgttttttaggtgttaggtattgtgttatgtaggatagaatatgttatttttatttaatttttaaaatatttttatgagataaagaatattattttattttatataaaaggaatatggttttgaaagtattaggtaatttgttttaagaaataaatttcgttagtgatattgttgggattttgtgaaattttgtttgattttagagtataagatataagttattaatttttgttgtattgttgtttgttagtttttgagaggggaaattaattgggaacgtattagttttgtttatgatattttatttgttttttttgtggagtcgtagtaaggtttaaattttaatttttaaatttcggtaataagatttagtgatttttgaatttggttgattatatgaattttttgagaaattttgaaataatagataaattttaagttttattattagggatttagaaaatttggagttgggttttgggatttatattttaatatttatttttgttggagaagtaaggtattatttatatttatatgataaatgaaaggatatttcgatttttgtttagtttttatagagaggtttttgagataggttaaaagtttttatttagtgtaaagatgagttgttgtatatgtttgtttttttgtttttatgtatatgtttattaaatatgtattaagtttttaatatgtttgatatagtaattttgtgattgtagataatttttttatttgtaaaatgtgagtaataataatatttgttttttgggtttgttttaaagattaaaataaaaatgtatggtttaatggtagtggatttggggggattttttatataaataagtgaatggaggtatgaataaataaatatataaagatgtgtgtatttatatttatatatataattaaaaatagttaaagatgtataaattaaagttaaatgtatgtgatattgaagtatatgttgattattgataatgaagtatagtataatttttaattttatattttaatattttatatttaataatttatattttaatttttagtttatttaagatatatagatatagatagaatgttttaaatgtattattgttttagttttaatgtataatatttatatgaaaaagtatttattagtgtgtagtaaatgtattagaatattatttataggttaaatgatattgataatgttttagagtcgttatttttatttttggataattttttaaattgagagtaattaaatttgttatttttttatttttttttataatggtaaataatatataaataatgagttgtgatttaaagaaataattttataatgtaaaagtttttttatgttttattgatttttatgtttttaattaattttggtagtttaagtttgtgattttagtgttgaggaaagtttattttattttagagtagtggggtttagttatgattttatattataattatttggataattaaagaatattgatgtagagttcgtatttaaagatttggaatttttagaagtgatatagaagtattggtatatatatatttttaaagtttttttggagaaatatatagttatgattgagaattattgttttggggaaagtgattatttttttattatttaaatagttaagttttaggaggtaaaatatttatatttttttttattaaaatttgtaaaatatatattttattaaagat

SEQ ID NO: 240 - DNA, 2501 bp, Artificial Sequence
  chemically treated genomic DNA (Homo sapiens)
gtaaatttttatattttgaggagagatagggttttattatgttggttaggttggttttaaatttttgattttaggtgatttattcgttttggttttttaaagtgttgggattataggcgtgagttattaagtttgacgggtagtaatttattttttatataattttttttttttttttttggtagagacgaggttttgttatgttgtttaggttggtttaaaattatcgggtttaagtgatttgtttattcgggttttttaaagtgtagggattataagtatgaattattatgtttggttgtaattttttatatatttcggatattaattttttattagataatatagtttgtaaattttttttttttttattttgtaggttgtttttttattgttggttattttttttgttgtatagttatttttaagtttgttgtaaatttatttgtttattttttgttttgttgtttgtgttttgttgttatatttaagaaattattgttaaatttattgttatgaagtttttttttatgtttttttttaggagtattatagttttaggttttatgtttaatttttaataagttttgtgtttttgtatatggtgtaaggtaagggtttaattttatttttttgtatgtggttatatagtttttttagtattatttgttaaagatataattttttttttatgttttggtgttttaaaaaaaaaaaaaattttggttggttacggtggtttaggtttataattttagtattttgggaggttgaggtaagtggattgtttgaggttaggagttttagattagtttggttaatatggtgaaattttgtttttattatcgaagatataaaaattagttaggcgtggtggagtacgtttgtaattttagtttattagggaggttgaggtatgagaatcgtttgaatttgggaggtagaggttgtagtgagttaagattttattattgtacgttagtcggggtgatagagtgaggtagggttttattttgtcgtttaggtaggagtttagtggtttaattatggtttattgtagtttatattgttagggtttaagttatttttttattttagttttttaagtagttaggattataggtgtgtgttattatgtttagtaaatttttgtattttttgtagagatggggtatttttatgttgtttaggttggttttgaatttttaattttaagcgatttttttatttgggttttttaaagtattgggattataggcgtgagttattgcgtttgatatggtgttttttaatttatttttattttttatttttatttttttgagataaggttttgttttgttttttaggttggaatgtagtggtataattatggtttattgtaatttttgttttttcggtttaagtgatttttttgttttaatttttggagtagtttggattatgggtatatgttataacgattagttaatttttgtttttttttttttttttttttttttttttttttttttttttttttgagatgtagtttttttatgttatttaggttggtttaaaatttttgggtttaagcgatttttttattttggttttttaaagtgttgggatgataggcgtgagttacgtggtgtttaaaaaaggtaataaaaaattttttatatattgggtatagaagtggtatgggtttttatatattgtgagatttttggtattagttataaattttgtgtatatttaagattttttagagtaggtgtaattatttcgttttatagatgaggatatagaggttgagtcgtagtgatttatttaaggtcgtatagttagtaaatagatggaggttggattggaattgaggattttatttaagggtttttataaatttttgggggtttttcgttgttttatttttattatatttgaaagaatgaatgaatgaatgtttcgggtatcgtgtttattttttagtaaatcgtggagtttggacgagtttattgtttcgcgtggggggggtgtgtgttcgttttgcgtatgcgtgttttttgggtatggtcggtttcgttttatttttttgtatagggtatcgttttttttcgtttggtatattttttttttttttacgttcggattggggtggtagacgtcgttttcgtttatcgtttttttttatcggttttcgcgcgaaaagtcggggcgtttgcgttgtcgtcgtcgcgtttgttgaagttttcgagatgtcggcgcgtatcgttttagttcgggtgtttatattggtcgtttcggttatttcgttgttcgacgatgttcgtaggcggtaggtattatgggggggaatacggatttagggggataggtagggcgttgggtggggggtcgttttttttcggggtggtcggtggtcgttgttgatagacgggcgcgtatgcgtggggtggtgcggcgcgtagcggtagttggcgcgggtagggtggtattttcggtcgcgcgtgttcgggttg

SEQ ID NO: 241 - DNA, 2501 bp, Artificial Sequence
  chemically treated genomic DNA (Homo sapiens)
tagttcgggtacgcgcgatcggaagtgttattttgttcgcgttaattgtcgttgcgcgtcgtattattttacgtatgcgcgttcgtttgttagtagcggttatcggttatttcgaggggaagcgattttttatttagcgttttgtttgtttttttgagttcgtgtttttttttatggtatttatcgtttgcggatatcgtcgggtagcgagatggtcgggacggttagtgtgggtattcgggttggggcggtacgcgtcggtatttcggaggttttagtagacgcggcggcggtagcgtaggcgtttcggtttttcgcgcggaaatcgatggggaggggcgatgagcggaggcggcgtttattattttagttcgggcgtgggggaggaggggatgtattaaacggagagaggcgatattttgtgtagaaggatggaacggagtcggttatgtttagggaatacgtatgcgtaaggcgggtatatattttttttacgcggagtagtgggttcgtttaagttttacggtttgttgggaggtgggtacggtgttcgaggtatttatttatttatttttttaggtgtgatggggataaagtagcgagaagtttttaagggtttgtgagagtttttgagtaaagtttttagttttaatttaatttttatttatttgttggttatacgattttaggtgggttattacggtttagtttttgtgtttttatttgtaaaacggggtaattgtatttattttagaaaattttgagtatatatagaatttgtagttagtattaagaattttatagtgtatagaggtttatgttatttttatatttagtgtgtggggggttttttgttgttttttttaagtattacgtggtttacgtttgttattttagtattttgggaggttagggtgggaggatcgtttgagtttaggagttttagattagtttaggtaatatagagaaattgtattttaaaaaaaaaaaaaaagaaagaaagaaagaaagaaaaaaagaaaaataaaaattagttagtcgttgtggtatgtgtttatagtttaaattattttagaggttgaggtaggaagattatttgaatcggagaggtagaggttgtagtgagttatgattgtattattatattttagtttgggagatagagtaagattttgttttaaaaaaataaaaataaaaagtaagaataaattaagaagtattatgttaggcgtagtggtttacgtttgtaattttagtgttttgagaggtttaggtgggaggatcgtttgaggttaggagtttaagattagtttgagtaatatagggatattttatttttataaaaaatataaagatttgttgggtatggtgatatatatttgtaattttagttatttgggaggttgaggtgggaggatggtttgaattttggtagtgtaggttgtaatgagttatgattgggttattggatttttgtttgggcgatagggtaagattttgttttattttgttatttcggttggcgtgtagtggtgagattttggtttattgtaatttttgttttttaggtttaagcgatttttatgttttagtttttttagtaggttgggattataggcgtattttattacgtttggttaatttttgtattttcggtggtagagatagggttttattatgttggttaggttagtttgggatttttagttttaagtagtttatttgttttagttttttaaagtgttgggattataggtttaagttatcgtaattagttagaattttttttttttttaaagtattagaatatgggggaaagattgtgtttttaataaatggtgttgagaaaattgtataattatatataaaagaatgaagttggatttttattttatattatatataaaaatataaaatttattaaagattaaatataagatttgaaattatagtgtttttagaagaaaatatggggaaaagttttatgataatggatttggtaatgattttttggatatgatagtaaaatataggtaataagataaaagatagataaatgggtttgtaataaatttaaggatagttatatagtaaaagaaatgattaatagtgaaaaggtaatttatagaatggggaaaaaaaaagtttgtaaattgtattatttggtaaagggttaatattcggaatatatgaaaaattatagttaggtatggtggtttatgtttgtgatttttgtattttgggaggttcgggtaggtagattatttgagttcggtagttttagattagtttgagtaatatggtaaaatttcgtttttattaaaaaaagaagaaaaaaattatataaaaaataaattattattcgttaggtttggtggtttacgtttgtaattttagtattttgagaggttaaggcgggtggattatttgaggttaagagtttgagattagtttggttaatatggtgaaattttgtttttttttaaaatataaaaatttgt

SEQ ID NO: 242 - DNA, 4138 bp, Artificial Sequence
  chemically treated genomic DNA (Homo sapiens)
gaatttcggattcggatttatgttttcgtttaaattttatgttaaattgtaaattttaatgttggaggtggggttttgtgagaagtgattggataatgcgggtggattttttgttttgatgttgtttttgtgatagagattttatatgatttggttgtttaaaagtgtgtagtatttttttttttttttttttttttttttgtttatgttttgttatgtaagacgtttttcgttttttttttatcgtttagaatgattgtaagttttttgaggtttttttaggagtagaagttattatgttttttgtataattgtagaatgatgagcgaattaaattttttttttttataaattatttagttttaggtatttttttatagtaatgcgaggatagattaatataattttttatttttagattttcgtatacgtttagttttagatattattgtttttgggagtatgtatagcgtagttttttgtcgataaaagtaaagttataaaggtgataaaaatttgtatttggggatatttgattgtgaaagaggatggatagtatatttgtagttatagagattggggtttatcgagttgaaatttggtagtattttggtataatatgtgtatgattcgtgtttaatgtttagagattagtgttgagtaaaatagtttggtttggggtcgttgttgtttttattttttttttgtttattagagggcggtagagttttttttttttattttggagtttttttaggggttgttgatttttttagtcgggtttatagtttagtagggtttatttttattcgggttatttcggtttacgtttttttcgtttttcgagttttttatacggattttgttagtttttttttgtagtttatcggtcgtttatttgaggtttgtcggtcgtttatttgaggtttgtcggttgttttttgtaggtagtttttgttttttatatttttttttttttcgggtttagttgaaagggcgttttttagggtagttttttgtgatttttagtatagtttagttttttataggtttcgacgttttttatgttgttattttatagttttgttattattattaattttttagttttatgaagtttattgagcgtttgtttttcggttataggaaaattttgtgatagggattacgtttgtaatgttttttgtggaattttaaggtttagtttagtgtttgatacggaatagatgttttataaatattggttaaatgtgtgggagatttttaaaaatagtatattattttcgtgtggtttttagtagttagagtttgttttatgtggatataggggtattggtattagtatgggaggaggttagtaagtgttcgcggttgttttaggaatgaggttttaatttttagagttttagaagggaggatagaggtttgtagggaatagatttttcggtttgattttgtagtttaatttagagtttagggttagtttatattacgtcgattttggttagtatttttagggtagttttagataaggtcggaggtttttttttttgttttttagggggtgatattgtatatagatattatttaggaaacggatttttttggataggaatttggttttgttaaggaagtggaggtggagtttggtttttattttttgttttaatagatttttttgattttttttatatatttgttttgtttttttttgggttttatgaggattttgttttgttaggggtttttgtgtaattttagatttttttttggtattattatggggaaggtggggtgattataggatagttagtttcgtagagatagagattatttaggatagttagggagaatatggataggttttgagtcgtagttttagttaatagatacggagagggagggtttttttggagttttttttaaggatagtagagtttagagttatttatttttttttattatagttttttttttttaggatatataagatatttttttttttatatgtaggatttggggatttttgagatttttgggtttgggtttttatttttgggttagtggcggggttggtggtattggagatagagggttggtttttttttagttattatttagtgagtttttttttagtttttagagttatttttgttatttttttgttgggtattattttatttttttagagttttggagagtatggggagattcgggattttgttgggtttttttgttataaaggaaaataatttttttggtgtgatagatttaaggatagaatatagtagaggttagtattggggaagataggttgtttttttaggggatgggggtggatttattttgtcgaaaagatttgtttgaggaattgaaaatagaagggaaaaaagaggagggataaaagaggtagaaatgagaggggaggggatagaggatatttgaataaagattatattttgatttacgtgatgttgagaagtatttttgttttaggaagagatttagggtagagggaggaaggatagtagattagatagttatagtagttttgataaaacgtttttggaatttaagtttttttttatagaggaggatagagtagatagtagagattatggagtttttttcggtttttttttatagatggtgtattttttggtagaggtttttgtttataggtgaagggaggataatttgggagagggtgggaggagggagtatagagattggttggggttttttgggtaggatagggttgtgagacggatagaggtttttgttggagtttgaatagggaagaggatattagagagggataggagttatattagaaaaattaaattgaattggaattggaaaggggtaggaaaattttaagagttttatttttttagttaattgttattggttattacgtttttaaaaattataataattgtattatatgatattttaaataaaaatataataattgtattagatgatattttaaataaaaatataattagggtatgaaatattgtttttattcgtttatcgcggatattggaaaataagttttaggttgtggagggttttgggaatttttatgaatttatttataggaatttgtagtttgttttaggtattggggtgtaattaagattatataaatttttgtttttatgaagtttatgtttttatggggaggaagatagatatataaagagatttagaatgtgaggttaggtgttgataagagttttggaggaatagagtagggaaaggttagaaaaggaagatttagggtttttagaggaggtgttagggaagggattttttaagaatgttttgatgtgagtaggatttgaaggtaatggggagggagtcgtgaagatttttggaaaagtagattttatatagggaaatgttaaggtcggaggtgttaaggaaataggagatatattgttgattttgatttagtaggatatatatatatatatatatatatttatttattttagggttgggggatgaagagatttgtttaggatttaggattttatttttttattttaatgtataggttttaatattgatcgatgttttttgtttttttttagttttatttttaattttttggaattcgtttattattgttaagtttattattgaatttacgtcgtttaatgtcgtagaggggaaggaggtgtttttatttgtttataatttgttttagtatttttttggttatagttggtataaaggtgaaagagtggatggtaatcgttaaattataggatatgtaataggaatttaataagttattttagggttcgtatatagtggtcgagagataatatattttaatgtatttttgttgatttagaatattatttagaatgatataggattttatattttatacgttataaagttagattttgtgaatgaagaagtaattggttagtttcgggtatatcgtgagtgatttttttatgatttttgggtgttgggggttagttttattttttatatataggattattaggtttgggttgtgttgtggttttttttgtattacgtattatgttagggtttgggtatttagtgtaggatatatatagaagagataaattttaatagattagaattt

SEQ ID NO: 243 - DNA, 4138 bp, Artificial Sequence
  chemically treated genomic DNA (Homo sapiens)
gaattttgatttgttgaagtttgttttttttgtgtgtattttgtattaaatgtttaaattttaatatggtgcgtaatgtagagggggttatagtatagtttaggtttgataattttgtgtgtgggaagtagaattgatttttaatatttagaggttatgggggaattatttacggtatattcggaattggttagttgtttttttatttataagatttgattttatgacgtgtagggtgtagaattttgtgttattttggatgatgttttggattagtagggatgtattggggtatattatttttcgattattgtatgcgggttttggggtagtttgttgagtttttattatatattttataatttgacggttgttatttatttttttatttttgtattagttgtagttaaaaagatgttggggtagattgtggataagtagaagtattttttttttttttgcgatattgaacggcgtggatttaatagtgagtttggtagtggtgggcgggttttagaaggttagaagtgaggttaggagagagtagagagtatcggttaatattgggatttatgtattagggtggaaaaatggggttttgggttttgagtaggtttttttattttttagttttggagtgagtgagtgtgtgtgtgtgtgtgtgtgtgttttattaggttaaggttagtagtgtgttttttatttttttagtattttcgattttggtatttttttgtgtggaatttgtttttttaggggtttttacggttttttttttattgtttttaggttttgtttatattagggtatttttgggagattttttttttgatattttttttagagattttgggttttttttttttgatttttttttgttttatttttttagggtttttgttaatatttgattttatattttagatttttttgtatgtttgtttttttttttatgagagtatgagttttatgagggtagggatttgtgtgattttggttgtattttagtgtttgggataggttgtagatttttgtggatgagtttatgagggtttttagggttttttatagtttggggtttattttttaatgttcgcggtaggcggatgaggatagtgttttatgttttggttatgtttttatttaaagtgttatttgatgtagttattatgtttttatttaaagtgttatgtgatgtagttattatgatttttaaaaacgtagtggttagtgataattaattaggaaaatagaatttttgaggtttttttgtttttttttaattttagtttaatttgatttttttggtgtgatttttgtttttttttgatgtttttttttttatttaggttttaataggagtttttgttcgttttatagttttgttttatttaggagattttagttagtttttgtgttttttttttttatttttttttaggttgttttttttttatttgtgagtaggagtttttgttaggggatgtattatttgtggggaggggtcgagggagattttatggtttttgttgtttgttttgtttttttttgtggagaagagtttgagttttaggaacgttttgttaaggttgttgtgattgtttggtttgttgttttttttttttttgttttgagtttttttttagggtaggagtattttttagtattacgtgggttagggtgtggtttttatttaggtgttttttgttttttttttttttatttttgttttttttgttttttttttttttttttttttatttttagttttttagataaattttttcggtaaggtggatttatttttattttttgggaggataatttgttttttttagtgttgatttttgttgtgttttgtttttgggtttgttatattagggggattatttttttttgtgatagagaaatttagtagggtttcgggtttttttatgttttttagggttttgggaaggtgggatgatgtttaataggaaggtgatagaggtggttttgggggttagaaaaaggtttattgggtggtggttggggagggattagttttttgtttttagtattattaatttcgttattgatttagggatggagatttaggtttagaggttttaggagtttttagattttgtatgtagagggggaggtgttttgtgtgttttggaaagagaggattgtggtggagggaggtgggtgattttgggttttgttgtttttggggaaggttttagggggatttttttttttcgtgtttgttggttgaagttgcggtttagggtttgtttatgttttttttgattgttttgggtggtttttgtttttgcgaggttgattgttttgtgattattttattttttttatggtggtattaggagggagtttggagttgtatagggatttttggtagaatagggtttttataggatttagaaaggaatagagtaggtatgtgggagagattagaagggtttgttggagtaagggatggaaattaggttttatttttatttttttagtaaagttaggtttttgtttaggggaattcgttttttgagtgatgtttgtgtgtaatgttattttttggagggtaaagaaggagattttcggttttgtttggaattgttttagggatgttgattagggtcgacgtggtgtgagttgattttgaattttggattaggttgtagggttaggtcggaggatttattttttgtaggtttttgtttttttttttgaagttttgggggttgaggttttatttttggggtagtcgcgggtatttgttggtttttttttatgttggtgttagtgtttttgtgtttatatggaatagattttgattgttgggggttatacggaggtgatatgttgtttttagagattttttatatatttaattagtatttatggagtatttgtttcgtgttaggtattgggttgggttttgggattttatagagagtattatagacgtggtttttgttatagagtttttttgtaatcgggagataggcgtttagtgaattttatgggattgaggagttaatggtaatgatagggttgtgaggtgatagtatagggggcgtcggagtttgtgagagattgagttgtattggagattatagggagttgttttgggagacgtttttttagttgagttcggggaaggagggggtgtaggggataggagttgtttgtagagggtagtcgataggttttaagtgggcggtcgataagttttaggtgggcggtcgataggttgtagggaggagttgatagagttcgtgtgaggagttcggagggcgaggaggacgtgggtcgaggtgattcgggtgagggtggattttgttaggttgtgggttcggttgaggaggttagtagtttttggggaggttttagggtgggagggaggaattttgtcgttttttggtggataggagggaagtggggatagtagcggttttagattaggttgttttatttaatattgatttttagatattgaatacgggttatgtatatgttatgttaaagtgttattaggttttagttcggtgagttttagtttttgtggttataagtgtattgtttatttttttttataattagatgtttttaaatgtagatttttgttatttttgtgattttgtttttgtcggtaggaggttgcgttgtgtatgtttttaggggtagtgatgtttggggttaagcgtgtgcggggatttgggagtagaagattgtattagtttgttttcgtattgttataaagaaatatttgagattgggtaatttataaagaaaagaggtttaattcgtttattattttgtagttgtataggaagtatagtggtttttgtttttggggaggttttagaaaatttataattattttggacggtgaaggggaaacgaggaacgttttatatggtagagtatgagtaagagagagagagagagaggggagaggtgttatatatttttaaataattagattatgtgagatttttattatagaaatagtattaaagtagaaaatttattcgtattatttaattattttttataaggttttatttttaatattggggtttataatttgatatgagatttgggcggggatatagattcggattcggaattt

SEQ ID NO: 244 - DNA, 11222 bp, Artificial Sequence
  chemically treated genomic DNA (Homo sapiens)
ggtttggcgttggtttaggagggtagattttgttagggaggtataagttaagttgggggtggggtgggagggtttgttggtaggagggaggtattgtttagattggtttttaaaggttggtttttagaaggaggaggaagagagtagtgaagatcgtggggagttttggttttgaggagttagagtttttttttttgttatatttttgattttttttggtggtgttttaagtttagatttattaaagggaattgttagttgtttaagggttagtaaatttttaggttatttagattggattttttgattataaaaattgtgggttaggtgtatagttgtttgaggggtttaaatttgtgtaggtgggtgttggaattttttttgttatagcgttttttttgtgtgtatgtgattagaggtgagagtggttggagatcgaagatggtagagttcgtttttttttattagattgaggttttcgatttgttttgtttggggagggtgtttagtggaagttttgggatgtttagtttggataagaaaagttttgggtgagtttgtttttttttttgtgaggtagatttagttgggtttttatatttttaaggagtaggcggagttgtcgtaaggaagtgtacgtgatatggaggtattttttggttcgatataaaaaaggatttttaaagttttaggtagtgagtttattatttttaggagtatttaagtagatgttagatgatgatttgtagggaaaattatgtttagtgggaaattggataaaatatcgttgaaggttttttttagttataagatattatggttttataattttagatttttttgtttttagttttttataagtttggaatttagaatttaagttttttcggtgttgaaaagttgaagattttgatattttagaattttaattttgggattttaagattttagaattgggagttttgaggatgattttataagttttagttttggatttaaaggattttgtgatatgaaagggaaaaagaggaggtttgatttggtgggatttagttttgttttattgggtattagattaatgtgttttgtattcgtgcgtgtgtgtgcgtgtgtgtagtatgagcgtgtaaggttgtagaaagttttgtatataaaggtagtttggtttttttattatgtgtttgtagtttttttgttttggttataatgaaggttgttatagggataataatagtttttaaatagagttggtgattttaggtagttatagtaattgtgaggtaacgttgttttgttgtagagatgtgtgagtataaatagatgtcggtgtttttttattagtttaaatggtaaaatttaaaaggtttattaattttaaagttataggtttttatgagtatgttagttaatgggggcgtttgttaagcgggtgatagttttatattaaatattttagtattagtaatgggttgatgagattttaaatgtttaggttatttttagataatttaggaggttagagacgggagaagagttgggattcgggtagtaattagttttgttttgtttcgtatttttaggggtgttttgatattttcgggagggtataggttagagagtatttgaaaatcgtatattgcgttttaatttttaggagttttagatttgttttttggttttttttagcgtattaggtagggggttttaggttagatgtggtatagtttaatgttatttttttttttttgttttttttttttatattttggatttatttttagcgagtgattagtagtaagggttaaattgttgagagtttgagatcggggtagatttttttagagttgtttttttttttgaggttgggtttggtatagattggggttttagtaatgggtttttaaatgaatgaatgaataaaggaataaatagatgattgattgattgaatgaatgaatgagattttttttggtatttttatggtttttttttttttttttgagatggaggttcgttttgttgttaggttggagtatagcgatttcggtttattgtaatttttgtttttcgggtttaagtgatttttttgttttagttttttaagtagttgggattataggttcgtgttattatgtttagttaatttttgtatttttagtagagatagggtttgaatatgttagttaggatagtttcgattttttgattttgtgatttatttattttagttttttaaattgttgggattataggcgtgagttattacgttcggttttttatggtattttagttatttattttgttattgttttttttattgttaaagagatgggtttttggaggtcggttggtttagtatttggggttgatttttggaatggttattagggaaggggcgttagaggtgtagtcggtgtttttgatttttttggtcgttaggagttagtcgatttagtatataggatttattgaatggagatataaggtttttttagggagtggcggtttatggtaattttagaatggttattagttaggttttagagatttatatagagggcgttttgatttaaagttgtattggggaattttaagtttggggattttttgaatttaattttttttttagttatattttttattatttgtttaatttttattaaatatttttgtttatattttgaagttgggatttgattggtagagttagtagatgttgattatttagatggagttttgatattggtttttttagtttggttgtgattggtagtaggtttgcgggagaattgtgtgttttagaatatgattggttatatttgtattttagtaagattggggtagggtagttatttttaaaaagttgtgtaggtggggtagttattattgataaatttagtgtagatttaggatggtttaaatattggtttattttttttgaattttattttttatagttgtaaagcggggtggtgttcgttattttatagaggtgttgtaaagattagatgtaattttgttaagtagttattttgtaaattgtatagttttatgtagatggaaggaagggtttgtgtttattttgattatagtattaaataaattgtattgtatttttattttttttagttatttttttaaaaagattttgagttttttgaatataggaaggtgttttatttgattttgttatttttagtatgtagtagtgtttgatatatagtaggtgttttattattgtgagagggatggatggatgggtggagttatagatggatagaaggatagatggagggatgggtggatgatggatggatagatggatggaggggggatgatgaatggagggataatgagtggatgaatgagggaatgggtggatggatggatggagggatggaggaatagatagatagatggagggatgggtgggtgatggatggatagatggatggagggagggatgatgaatggagggataatgaatggatgaatgaggggatgggtggatggatgaatggagggatgatgggtggatgaatgaattgagggatggatggatgaatatatggatggatggatagatggatagatggaggaattggtggattttggatggatgggtggatggatagatgaatgaatgtttggatagataaagagatgatggatagatgaatagatgaattaagggatgtcggatagatggagggattgatagatgttggatggatgggtggtggatggatagatgagtgaatgtatggatagataaagagatgatggatggatgaattaagggatgatagatggatggatggatgagtaattggatggataagtggataaatggatagatggttgaatatttgaatggattgaaggaggatgtatggatgtaagataaggttaattattttttattttttttttttgtaaaattatttatttatttatttaataaatatttatttagtttaaatttggtataaagtattatgtgaggtttaagagatacgtgggttaataaaatagagtttttgtttttttgaaaattgtaaagaaaggggcgtggttttttgagtttaaattttaattttgttagcgattagttgtatattagtgatgtttttttatttttttttaattaaatagggataatgttagtatttattatattgggaggttttgcggggattaaatgagttattaaatgttaagtgtttgggatagggtttggtatttagtaaagttttttgtgagtgttggttgttattattttaatggagaagatggtatgaaaattaggaaataggatgttttttgggaagtaatgtaataggaatttatataaagaaaggaaaggaggaagtaattagtggtgttttaaaggagtatgttaagaaaaattttttagagggaaatttttgagtagggttatgaaaataggagttttttaagagattgtggatttgtttgggattatttggttataagtataaaattattcggtttttttttgttatttttggttgggtgaggggtttttggtaaaggggtagaaggtgcgtgagaggttgcgaatggttaggattgttttggggttagtcggggtatttggtggttaagtttagaaatatgataggtttttttgggagggttgatcgtagggagcgttgggttttaggttgttggcgtcggtttttgtggtgttttttttgtcggttatgagagtttagatagtgtttaattttttttttttttttttatacgtataattattttattttttgtggtttgagttgttttgtttcgttataatggtatttgttttaaaatagttttttatgtgagggttagagaaaggaaaagattagattttttttggatgagagagagaaagtgaaggagggtaggggagggggatagcgagttattgagcgatttttgttaagtattttagaaggtataaaaacgtttttgggattaggtagttttaaattttagttgttggggttaggatatttagtgagtttatatttgttttttttgttttttttagattgcgttatggggtttagcgacggggaatggtagttggtgttgaacgtttgggggaaggtggaggttgatattttaggttatgggtaggaagtttttattaggtaaaaggaagagattttattgtttttgttatttatattttaagattaagggtgtttagttgtaaggtggaaagtttgtacgtggggtaggttagttggttgtattagttaagggtgttagaacggttatttgttttttttttgtttttaagtgttagggattggatttaggagagggaaaggagttattttaggttgatgttagtagttggaggaagtatgagaattaaatttaggatgtttagagtttattaggaagaattttagaattatagatagttagagttaataagggttttgagagattttgtatagttattttttttataggatgaggataaaaagggattgagaaggggaggatatttttagagttatagtttattaaatgtttttaaagtgttaaggttaagatatgttttttaaggggagatagatttggttttagatttggttttgttattgagttattgggtgatttttgggaaagtatttaatttttcggagttttaatttttttttttgtatagtgaggggatattttaatatttatattttagaggagatgtgagaattaaataaaataatgtatgtaagaggtttggtatggtttttggtatatattgagttttagaaatgttagtagttattattgatgaagtttaggttagggattttttaaagtattgtaattagagaatagaagatagaggtttattagtgattttcgatgttgagtatgtttttagtttgagaggtttgaatgatgtggtttgtaagtatattttgttttttattataagggattttagaatatattaaagaaaataaaattttgaggtttgtaaatagagggtggttgtggtttgtatatagaagtttattttttcgttgttttttattttaaaggtgatatattttttttttggtttttttttttattattttgagttggtttttttagaagtttaataggttaagaattaacgtttttgttaacgggaggaaggaagtgggcgtcggggttgttataagtgaatggattgtttttggtattttaatttgtagattaatttttttttatttgtgagttagagttaattttttttttttatttcgtcgttttttgggttttttttgggttttatttatttttagttttcgtttatttcgggagtatggttggttttggaagtttcgttatttaaaatttgagtcgttggtgattcgtgttagaaatatttgaggaagaagagttgagttttttgttgattgtaatggtatcgtagtgtgtttatgtttttttttttttgtttttgttatttggttgtaataggttttgttggattgtataaagtgttttttcgattaatatatatatataaattgatattaatttttgggttatagatatgttatgtgattttggataagtttttttatttttgggttttatttttttgttggttgagcgaagggattgttttttatggttttcgagatttcgttttacgtttatgttttagaattttttgagtttttgatgtatttttgtttttggcgaggaggtaggatagttaggcgtggaggtaggagattagagtttgtagagtagaggtttttttaaggtgatttgggagttgttagatttaaggtagtgatttgtacgttttgaaagagatttagggtgttgtattattagggaggattacggaggtttgtcgggggtcgggagttagggataagatataatgtttagggttgttggtttttgaaaggttttagaggtttggtgttttgttacgttttaggttgtgggatatgtagagattgtgttagttggttttgtttttttagtatttggggtatagggaggatggtttttttgggggtagggtggaggaggtttatgtttaggattgtaaatgttattcgtgagagttggtattttgattttgttttagatattgattttggattttttaattgattttgaaaggttatgtttttaattttttgattgtaaaagagggtaaattttatgaagtttagtttgtaaaatattgaggtttttattgtacgtatataaatataaaattttagaatatagaagttggaaggttatttggagattttggttttaggagtggggtttcggaagggagggggttgttgagtgggttttatatttttgttttttttttttttatttaaattttttttgttttatttattttggttgttttggggagcggggggaataaaggattttaaggttataaaatgtttgaaaattattagtggtggttattattttttattatagggaggaattgggtttgagagtttttatcggttaatggtagttataggtaggattaaaaatttttgggtgatggtgatgataatgataatgataatgataatggtagagatgatgaggaggagaaagatagtaattatttatttagtatatattgattgttgggttttgtttaagtgttttatttattgaagtttgataataattttatgaggtagatatgattatgattattatatttaatagagaggttaagtaatttacgttaagttatatagtaagtaagaaaggagttggaatttaaatttaggtagtttggatttagaatttttgttttttttttttttttttgagatggagttttgttgggattataggtgtatgttattatgtttggttaatttttgtatttttagtagagattaggtttcgttatgttggttaggttggtttcgaatttttgattttaggtgatttgttcgttttggttttttaaagtgttgggattataagttaatgagttcggtttagaatttttgtttttgattattatgttatattgttttatgattttgttatacgtaagacgggttgttatttacgttttggtttttttattttagtagagttagaggggtgtttatggatttgataatgtgttttatgttttatgtgagtgtttaattgggttttagtttagagaatagtaggaaaatggttttttttttttttgatttggattgaagatttgtttgatgaattaggtttattgatagtagggttgaagttggaaatataggttagcggggttttttgaaatattagagtaaacgtttttcgtttatttttataggttgaggggtttttatttgtttatttttcggattaggtaaatttaggagaatggttttttgtggttgtttggggggtttttagttgtaaggtttgggtttataggaggtaggtagttgtgtggtgtcggaatgattttgcggggagataaattagttcgattttgttttgttgtttaaagtaaatatggggtggggtggggtggtttaggtttataattttagtattttgggaggtaggatcggggaatcgtttgagtttaggagttcgagattagtttgagttatatagtgagattttttttttttataaaaaataaataaaattagttgggcgtggtggtgtgtgtttgtagttttagttacgcgggaggttgaggtaggaggattatttgggtttaggagattgaggttttagtgagttaagattatattattgtattttagtttgggtaatagagtaatatcgtgttttaaaaaaatattaataaagtaaatatgagttttttttttggttgtttggtgttgagtggaaagaaaggtattggcgggtttagatttttttggtttatatatggatgagtaatgatttagagaggttaagtgattttaatattatagagtatattggcgttagaattgggatcggaatttagttttcgtaattgttagttttatgtttttttttttagatattagagggtaggggtaggttttaaaatgtttgagatttttagttgttttgtggtttaaatttttggttttgttttgttttagatagtttgtttttagcgttttgatttttgattatcgtttgtgtatgttaggttttgtatttgttaggcgggagtttaaggattattgtcgttagataataatagttaggagtttagggatttttggatgaaaggtgttagagataagtcgttagtgacgtacgaggatttggataaggttttggagcgaggtggtaatgttgggtacggcggtagattatgtttaatatgggggaagggagtgtatgtggtttaggtttgtgcgtgtttttgtgtgtgtgtgtaggtgagtatggcgtgtgttgggatatatttatgtgtatttttgtgtgagtgtgtaggtttatatgtgagtgtgtatatatatttgtgagagtttgtatgtatgtatacgtgtgaggtgttgatatatgtttatgtaggtattagtttgtttgtaaatatttttgtgtaataataataaagttcgaatagttattaagagtatagatatgaagttagattgtttgggttaaatttttagttagttagtttttcggtgtttttgtttttttttttgtaaaatggcgtttattttattaggattttaaaattagttaatatggttgggcgtttgtaattttagtattttgggaggttgaggtaggcggattataaggttaggagatcgagattattttgtttaatatggagaattttgagaattgtttaaatttaggaggtggaggttgcggtgagtagagattgtattattgtattttagtttgggtaatagagttagattttattttaaaaaagaaaaataaaaaataaaaaaattatgaatttatttttaggttgaggagtttagtattttggttgtgaaatattttttttataaaattttgggatggagattacggggattaggtgtttttttgtgataatttttgggtatggtggtttagggcgtaaattggagtgtggttataatatatattgtgtatttttataaggatgttatagagtttgggtattataaaagaggagttttttaaggaattgaaattattagataggagagagagttttgggtagatagggttgttcgtgttaaatattttagttgtggtataagggaaagggtgggagttatgaaattgttttattttgggtttaggtttgggttttgtcgttagttagttaagtgattttggttatttatttttgtggttttttatgagtaaaaggcggaaatttatttttatttagagggtaggtttgattttttttaattagtatttatttgtttatagtaggaaggattgaggtttaaagttggaggtgggtaggaaggattgaggtttaaagttggaggtgggtaggaaggattaaggtttaaagttggaggtgggtaggaaggatcgaggtttaaagttggaggtggttgtttagagttttagtagaggtttttggggtattttattgagtgtttggtaggagtgggtgtttgttttagggttgggttgagttgtttttattaggatttttcgttatttgtatagtgaggggattgggaggtttagagagttatagtttgggtttaaaataagtaagaggtttttgagtgtgaggattgttttggagtggaatggtttttataggtaggagtgagttttttgtagttagaggtatttaagtagttgaaggataatttttgggtaggaagttgtagagatggtcgtagcgtggattagaattgttgttttggttatttagattttattttagtttggtttttttggatagtatttttgtaatagtgagttggtgattttacgttttagaatttcggtttttatatttgtaaaatgggaattatatgatatttattatgtgttagatattttgttggtatatagtatatattattttatttaattttttaagtagggataagttatttttattttttatatgaggaagttgaggtatagagaggtgaagtgaatggtttaaggttatatagttgggaagatagggagttaaatttgaattttagtttggttgtttttagattttatatcgtattttttatgtcgattttagttttttttgtgtttatagg

SEQ ID NO: 245 - DNA, 11222 bp, Artificial Sequence
  chemically treated genomic DNA (Homo sapiens)
tttgtgggtatagggaaggttggagtcggtatgggaggtgcggtgtgaggtttgggggtagttagattagagtttaagtttagttttttgtttttttagttgtgtgattttgggttatttattttatttttttgtgttttagtttttttatataagggatggggataatttgtttttatttgaaggattaagtgagatagtgtgtgttatgtattaatagggtgtttggtatatagtgagtgttatataatttttattttatagatgtggaaatcgaggttttgaggcgtaaagttattagtttattattgtaggggtgttgtttagagaagttaggttggaatgaggtttgagtgattaaaatagtagttttagtttacgttgcgattatttttgtagttttttgtttagggattgttttttagttgtttaaatatttttagttataggaggtttatttttatttgtgagggttattttattttagagtaatttttatatttagaaattttttgtttgttttgagtttaagttgtgattttttgaattttttagtttttttattgtgtagatgacgaagggttttggtgggagtaatttaatttagttttgagataggtatttatttttgttaggtatttagtgaggtgttttagaggtttttgttgggattttgagtagttatttttagttttagatttcggttttttttgtttatttttaattttagattttggttttttttgtttatttttagttttagattttagttttttttgtttatttttagttttagattttagttttttttgttgtgagtaggtgggtgttggttaaagggagttagatttgttttttgggtaggagtgagttttcgttttttatttatggaagattatagagataagtggttaaggttatttggttagttagcggtagagtttagatttaaatttaaaatggaatagttttataatttttatttttttttttgtgttatagttgaaatgtttggtacgggtaattttgtttgtttagggtttttttttttgtttaatggttttagttttttgaaaagttttttttttatgatatttaggttttgtgatatttttgtaaaagtatatagtatgtattgtggttatattttagtttgcgttttgagttattatgtttagaagttgttataaggaagtatttgattttcgtagtttttattttagggttttatgaggagggtattttataattaggatgttgagttttttaatttgaaaatgagtttatggtttttttgttttttgttttttttttttgagatggaatttggttttgttgtttaggttggagtgtagtggtgtaatttttgtttatcgtaatttttattttttgggtttgagtaatttttagaattttttatgttaggtaggatggtttcgattttttgattttgtgattcgtttgttttagttttttaaagtgttgggattataggcgtttagttatattaattgattttaaaattttgatggggtagacgttattttgtagaggaagaaatagaggtatcgaaagattaattagttggggatttaatttaggtagtttggttttatgtttatatttttgatgattattcggattttgttattgttatatagagatatttataggtaaattgatatttatatggatatgtattaatattttatacgtgtatatgtatgtaggtttttatagatgtgtgtgtatatttatatatgggtttgtatatttatatagaggtatatataaatatattttagtatacgttatatttatttgtatatatatatagagatacgtataagtttgaattatatatattttttttttttatgttgggtatggtttgtcgtcgtgtttaatattgttatttcgttttaggattttatttaaattttcgtgcgttattgacggtttgtttttgatattttttatttaagggtttttgagtttttgattattattatttggcgataatgatttttgaattttcgtttgatagatgtaagatttggtatgtataggcgatggttagaggttaggacgttgaaagtagattgtttgaggtagagtagggttaagaatttgggttataaggtagttgggggttttagatattttggggtttgtttttgttttttgatatttagggaagagaatatgggattgatagttacggaagttgagtttcggttttagttttggcgttaatgtgttttgtgatgttgaagttatttagtttttttggattattgtttatttatatgtaaattaaaagggtttagattcgttaatgtttttttttttatttaatattagatagttagggagagagtttatatttattttattaatatttttttgagatacggtattgttttgttgtttaggttggagtgtagtggtgtgattttggtttattggagttttaattttttgggtttaagtgatttttttattttagtttttcgcgtagttgggattataggtatatattattacgtttagttaattttgtttattttttgtagagaaggggggttttattatgtggtttaggttggtttcgaatttttggatttaagcgatttttcgattttgttttttaaagtgttgggattataggtttgagttattttattttattttatatttattttaaatagtagagtagaatcgggttaatttgttttttcgtaagattatttcggtattatatagttgtttgttttttgtgggtttaggttttgtagttaggagttttttaggtagttatagaaggttatttttttggatttgtttgattcggaaaatgaatagatgaaagttttttagtttgtggaaatggacggagggcgtttgttttagtattttagaaagtttcgttggtttgtgtttttagttttaattttgttgttagtgggtttggtttattagatagatttttagtttaagttagagagaagggaggttatttttttgttgttttttgaattgaggtttaattggatatttatatggaatatggagtatattgttagatttatgaatatttttttggttttattagaataaaagaattagagcgtgggtggtagttcgttttgcgtgtggtaaggttatggggtagtatagtatagtggttaagagtaaggattttgggtcgggtttattggtttgtaattttagtattttgggaggttaaggcgggtagattatttgaggttaggagttcgagattagtttggttaatatggcgaaatttagtttttattaaaaatataaaaattagttaggtatggtggtatgtatttgtaattttagtaagattttattttaaaaaaaaaaaaaaggagtaaggattttggatttaagttgtttgaatttgaattttagttttttttttatttgttgtgtgatttggcgtaagttatttaatttttttgttaaatgtggtgattataattatatttattttataagattgttgttaggttttagtgagtgaaatatttaaatagagtttagtaattagtatgtgttgaataaatggttgttgttttttttttttttattatttttattattattattattattattattattattattattatttaggaatttttggttttgtttgtggttgttattaatcggtggagatttttaggtttagtttttttttgtaatgagaagtagtgattattattggtgatttttaaatattttatgattttgaaattttttgtttttttcgttttttaaaatagttaaagtaaataaaataaaaaaggtttgagtaaagaaaggaaaaataggggtgtggagtttatttagtagttttttttttttcgaagttttatttttggagttagaatttttaagtgattttttagtttttgtgttttagaattttatgtttgtgtacgtgtagtgaaggttttagtgttttatagattgggttttatggaatttgtttttttttataattagaagattggagatataattttttaaggttagttagaaaatttagagttagtatttagaataaagttaagatgttaatttttacgggtggtatttgtagttttgggtatgagttttttttattttgtttttagggaggttattttttttgtattttaaatattgagagggtagaattagttggtatagtttttgtatgttttataatttaagacgtgatagggtattaggtttttgggattttttagggattagtaattttaggtattatgttttatttttggttttcggttttcggtaaattttcgtgattttttttgatgatgtaatattttgagttttttttaagacgtataagttattgttttaggtttggtagtttttaaattattttggaaagatttttgttttgtaaattttggttttttatttttacgtttgattgttttgttttttcgttaaaggtaaaagtgtattaaggatttagagaattttagggtatgagcgtgggacgggatttcggagattatggaagataattttttcgtttaattagtagagaaataaggtttagaggtggagagatttgtttaaggttatatggtatatttgtggtttaggagttgatgttaatttgtgtgtgtgtgttggtcgggggagtattttgtgtaatttaatagggtttgttgtagttagatgatagggataggagaagaaagatataaatatattacgatgttattatagttaatagaaaatttaattttttttttttaagtgtttttagtacggattattaacggtttaaattttagataacggagtttttaggattagttatgttttcgaggtagacggaagttggaaatgggtaaagtttaagggagatttaaaggacgacggagtggaagaggaaaattggttttggtttataaataaggagaaattaatttgtaaattaaagtgttaaagataatttatttatttgtggtaatttcggcgtttattttttttttttcgttggtagaaacgttgatttttaatttattagatttttgagggaattagtttagaatggtgagggaaggggttaagagaagagtgtattatttttgggatagaaggtaacgaggagatgagtttttatgtataaattatagttattttttatttataaattttagaattttgttttttttggtgtattttggaattttttgtggtagaaggtaggatatatttgtagattatattatttagattttttaaattagagatatatttaatatcgaaggttattaatgagtttttattttttgttttttaattgtaatgttttgaaaggtttttagtttgggttttattagtaatagttattaatatttttaggatttagtatatgttaggaattatgttaggttttttgtatgtattattttatttaatttttatattttttttaggatatagatattaggatatttttttattgtataggagaggaaattgaggtttcgagaggttgagtatttttttaaaggttatttagtggtttagtggtagagttaagtttagaattagatttgtttttttttgaagagtatgttttaattttgatattttaagagtatttaatgagttgtgattttggaaatgtttttttttttttagtttttttttgtttttattttgtaagagaggtggttgtataaaattttttaggatttttgttaattttgattgtttataattttaaaattttttttggtggattttgagtattttaggtttgatttttatgttttttttagttgttgatattagtttgaaatggttttttttttttttttgagtttaatttttgatatttaaaagtaaagaaaaagtaagtgatcgttttaatatttttaattaatgtagttaattgatttattttacgtgtaaattttttattttgtagttgaatatttttgattttagggtgtgggtggtaggggtaatggaattttttttttttatttgatgaggattttttgtttatggtttgggatgttagtttttatttttttttagacgtttagtattaattgttatttttcgtcgttgagttttatggcgtagtttgaagaagataaaaagagtaagtatgggtttattgggtgttttggttttaatagttggggtttgaggttgtttggttttaagggcgtttttatattttttgggatgtttgataaagatcgtttaatggttcgttgttttttttttttgtttttttttatttttttttttttatttagggagggtttaatttttttttttttttagtttttatatgggaagttattttagggtaggtgttattgtggcgaggtaggatagtttaggttatagggggtggggtggttgtgcgtgtggaaagaaggggaggaggttgggtattgtttggatttttatagtcgatagaaagggtattatagaagtcgacgttagtagtttgaaatttaacgttttttgcggttagtttttttaagaggatttgttatgtttttaagtttggttattaggtgtttcggttggttttaggatagttttggttattcgtaattttttacgtattttttgtttttttgttagagattttttatttagttagaagtgatagaaaggaatcggatggttttgtgtttatagttaggtggttttaggtaagtttataattttttagagaatttttgtttttatgattttgtttaaaggtttttttttgaaaagttttttttgatatatttttttgagatattattaattgttttttttttttttttttttgtgtaagtttttgttgtattgttttttaaagggtattttattttttggtttttatgttattttttttattaggataatagtagttagtatttataagagattttgttgggtgttaggttttgttttaaatatttggtatttggtaatttatttaattttcgtaagattttttaatgtgataggtattgatattatttttatttaattgagagaaagtagggaaatattattgatgtataattagtcgttggtagagttgggatttgaatttaggaagttacgtttttttttttgtagtttttaggagggtaggagttttgttttattaatttacgtattttttgggttttatatggtgttttgtgttaagtttgaattgaataaatgtttattgagtaaatgggtggatggttttgtaaagaaagagagtggaggatgattagttttattttatatttatgtatttttttttaatttatttaggtatttaattatttatttatttatttatttgtttatttagttatttatttatttatttatttgttattttttaatttatttatttattatttttttgtttatttatgtatttatttatttatttatttattatttatttatttaatatttattaatttttttatttattcgatattttttaatttatttatttatttatttattatttttttgtttatttaggtatttatttatttatttatttatttatttatttaaaatttattagtttttttatttatttatttatttatttatttatgtgtttatttatttattttttaatttatttatttatttattatttttttatttatttatttatttatttttttatttatttatttattatttttttatttattatttttttttttatttatttatttatttattatttatttatttttttatttatttatttgtttttttatttttttatttatttatttatttatttttttatttatttatttattatttttttatttattattttttttttatttatttatttatttattatttatttatttttttatttatttttttatttatttgtaattttatttatttatttattttttttatagtgatagagtatttattgtgtgttagatattgttatatgttgaggataataaaattaaataaaatatttttttgtgtttaaggaatttagagtttttttagggagataattaagaggaatgaaaatatagtatagtttgtttagtgttatgattaaggtaggtataggtttttttttttatttgtataagattatatagtttataaagtggttgtttggtaagattatatttaatttttataatatttttgtgaggtagcgagtattatttcgttttatagttgtgggagatgagatttagaaaggataagttagtgtttgggttattttgggtttgtattggatttgttagtaatgattgttttatttatatagttttttgaagataattgttttgttttaattttgttgaggtgtaggtgtagttagttatgttttgggatatatagttttttcgtaaatttgttgttagttatagttaagttgagaaagttaatgttagggttttatttgaatagttagtatttattagttttgttagttagattttagttttagaatgtgaatagagatgtttggtaagaattggataaataataggaaatgtagttagaaaaagagttaaatttaaagaatttttaaatttggagttttttagtgtaattttgggttagaacgttttttgtgtgggtttttaaagtttggttggtgattattttaggattgttatgagtcgttattttttggaggagttttgtgtttttatttagtgagttttgtgtattgagtcggttgatttttagcgattaaaagggttagaggtatcggttgtatttttggcgttttttttttagtgattattttagaagttaattttaaatgttaggttagtcgatttttaaaggtttatttttttagtagtggaagaagtagtaataaaataagtagttaaaatgttatggggggtcgggcgtggtggtttacgtttgtaattttagtaatttgggaggttgaggtgggtggattataaggttaagagatcgagattattttggttaatatgtttaagttttgtttttattaaaaatataaaaattagttgggtatggtggtacgaatttgtagttttagttatttgggaggttgaggtaggagaattatttgaattcgggaggtagaggttgtagtgagtcgagatcgttgtattttagtttggtaatagagcgagtttttattttaaaaagaaaaaaagaagttatggggatgttaaaggggattttatttatttatttagttagttagttatttgtttgtttttttgtttatttatttatttgaaagtttattattgaggttttagtttgtgttaggtttagttttagaaggaaagataattttgagagggtttgtttcggttttagatttttagtagtttgatttttattgttggttattcgttggaggtgagtttagggtgtgagagaggagggtagaaagaaggagatggtattgagttgtgttatatttgatttggggttttttgtttggtgcgttggggaaggttaagaggtagatttgagatttttggagattgagacgtaatgtgcggtttttaaatgttttttggtttgtgttttttcgagagtgttagaatatttttgagggtgcggggtagggtagggttgattattattcgaattttagtttttttttcgtttttggttttttgagttgtttggggatggtttgagtatttaaaattttattaatttattattgatgttgaaatgtttaatatgaagttattattcgtttggtaagcgtttttattaattggtatgtttatggaaatttgtagttttgaagttgatggattttttaagttttattatttaagttaatgggaaggtatcgatatttgtttgtatttatatatttttataatagagtagcgttattttatagttgttatggttatttggagttattagttttgtttgggggttattattatttttgtgatagtttttattatggttagggtagagaagttgtagatatatgataggaaagttaggttgtttttgtgtgtaaaattttttatagttttatacgtttatgttatatatacgtatatatacgtacgaatgtagggtatattagtttgatatttagtggggtaaaattggattttattaagttagatttttttttttttttttttatattataggattttttgaatttaaaattgagatttgtagaattatttttaaggtttttaattttggaattttgagattttagaattaaaattttagagtgttaaagtttttaattttttagtatcggagaaatttgggttttagattttagatttatagagagttagaagtagagaaatttagaattatagggttatagtattttgtgattaaaagaggtttttaacggtattttgtttaattttttattaaatatagttttttttatagattattatttggtatttgtttgaatatttttgggagtggtgagtttattatttaaagttttaaaaatttttttttatgtcgaattaaaagatgtttttatgttacgtgtatttttttgcggtagtttcgtttgttttttggggatatagaggtttagttgagtttgttttataagagaaggagtaggtttatttaagattttttttgtttagattgaatattttaggatttttattgagtattttttttaggtaaggtaagtcgggggttttagtttggtggagaaagacgggttttgttattttcggtttttagttatttttatttttggttatatgtatataaagagaacgttatagtaaaggggattttagtatttatttgtataggtttgagttttttaggtagttgtgtatttggtttatagtttttatggttagaaaatttaatttaggtgatttaggaatttgttagtttttggatagttgataattttttttggtaaatttgggtttaagatattattaagggagattaaagatgtggtaagaaggagaattttggttttttaaagttaggattttttacgatttttattatttttttttttttttttttgggaattagtttttggaggttagtttgggtagtgttttttttttgttagtaggtttttttattttatttttagtttagtttgtgtttttttggtagagtttatttttttggattagcgttaggtt

SEQ ID NO: 246 - DNA, 5952 bp, Artificial Sequence
  chemically treated genomic DNA (Homo sapiens)
atatttttgatttttatatgagtatatgttcgagtagtttggattataggtgtgtagtattatatttagttaatttttaaatttttgtgtagcgatgaagttttattttattgtttaggttggttttaaatttttgggttcgagtaatttttttatataggttttttaaagttttgggattataggtatgagttatagtattcgagtaagatgattttttaagataggtgaagatgttagtgtttagaattttatttttaggggtacgtaggtatgaaaggttatatttaagtgagtgttatgttagtttttttagaaatttagttgtttttttttaaatttagtttaataaaaggaggtttggagaattaatgtatataagttagaattatagaatgtatagtatgattattaggatggataatatgtggtttgaataaattttttatttattatatttagtttttttaggttaatggaatttagattaagtatatttttgaagttagtattgtgtgacgaataggggtttggtggaagtgatgttaatagggttttaggttagttttagagttttttttttttttttttttcgttttttgttttttttttgtttgttttttgttttttttttttagatagttttttttttgttgtttaggttggagtgtaatggtgtgatttcggtttattgtaattttcgttttttaggtttaagtaatttttttgttttagtttttcgagtagttgggattataggcgttcgttattatagttggttaatttttgtatttttagtagagataggggttttaggttaggttggttttgaatttttgattttaggtgattcgtttatttgggttttttaaagtgttgggattataggtattagttattgtatttggtttaagaaatatttttaagtatgtttgattttggtaaatgtttttgattttttttgtaggaaaaaattttagagatcgaatttttgtgttaaagaataagtaaaattttaaggtttttgatatatatttttaagtttttattagaaaaattatattaatgtatatttttatttgtaatgtatttaagtgtttatttttttgaattttttttaatatattaggtgttaatatgatttttattaatttggtaggttaaaattttgtttttattgaatttatatttttttgtttattaatgtggttaataaattttacgtttatgaagattaggattggatagtggaggttagatatttttggttttttgtttagatgaataaattttttattttttttaatttatttaagttgagttttttgttattgaaatttaaattatattaattaatataattttttgaggtatattgaagttttaaaatttgtatggttatttattatgttttatgggttttttttttatgtttggaagtttataggaagattttataaatatttattaaaatatttttttattttttattgggttaagatttgaatttgaattttttatttagaatttagtgaataattattaggaaaagtttttttttttttttttgagatggaggtttgttttgttatttaggttggagtatagtggcgtaattttggtttattgtaatttttgtttttcgggtttaagtaatttttttgcgttagtttttttagtatttggaattataggtgtgtattattacgtttagttaatttttgtatttttagtagagacggggttttattatgttggtttggttggtttcgaatttttgattttagatgatttatttattttagttttttaaagttttgggattataggtatgagttattgcgtttatttagaaaagtttatagtttttatttttttttaatagtttaattaattatttgattaaaatttattttatttttttttttattgatttaatagtatttttattagatgttagagtagttatttaaaatgtaaattggattatattaaagatttgttgttgattatatttttttgtatttttagagagtttataaagttttgtaagagtttattttagtttttttgtaattttattttgtattatttttgttttagatatattagtttgagttttatattaaatttgtttgaatatattttaagtatgttgatttttataattatgttatttttttagtttagaatgtttttttttaattttttaagtagttgttttttttgataagatgttatttttttagagaggttttttttgattatagttataggtatgtttatgtttttattttagtttaatataaaatttacgtaattgtatatttttttattatttgatatttttaggaggatattatttttgtaatagagtagaaataaatagattgatgtatatggtggattttttatggatagagtttgttatttaaaatgtttttaaatttattatatgtaatttggtattaaattaaaatgttattatgtaagcgaatgtttttaaagtttaaaagtttttttaaaataaaatagattcgggcgcggtggtttatgtttgtaattttagtattttgggaggttaaggtaggtagattatatgaggttaggagtttaagattaatttggttaatatggtaaaatttcgtttttattaaaaatataaaaattagttaggtgtgatggcgtatgtttgtaattttagttatttaggaggttgaggtatgagaattgtttgaatttaggaggcggagattgcggttagttaagattatattattgtattttagtttgggtgatagagtgagattttgttttagaaaaaaaaaaaagaaaaagaaaaagaaaaaaaaaaagaaattttaagtgataaagtattgtgtaatagtttgaggttgggtatagtggtttatgtttgtaattttatattttgggagatcgattgggaagattgtttgagtttaggagttggagattagttagagcgatatagtgggattttttttttataaaaatatttaaaaattagttaggtatagtggtgtatttttgtagttttagttatttgggaggtggtaagaggatttttcgagtttagaagttggaggtggtagtgagtagttattttgttattgtattttagtttgggtgttaaagggagatttttttttttagaaaataataaaaaaaaaagtttgatagtttttttgtttgtgttatataaaataatggtatatattataattgaaggtattttataatagaaatgtttttttttgtttttttttaaggttgatttagtgttttaagaggttgatatagaagggtaaagttaagtttttataaaatttagggaagagattgtgaaatttattttagaattttgtatggagttatagttgaattaggaaaaaaaaaaaaaaaaaaaaaaggaaagaaaggtattttagagataaagaatagattaaggagaggagatatttgaagttataatgattgagaatatgttagatttgaaatgaatttttagtttttttaataagataaataaaattaattttatatttagatatatggtagaaaaattaaagaattttgttgattaaggtattaaaagtaattaaagagaagtggtgtgaagaaagtaagagagaaataataaattttgtttattttgtaataattgaaaatttttggttgggcgtggtggtttacgtttgtaattttagtattttgagaggtcgaggtaggtggattattttaggttaggtgtttaagattagtttggttaatatggtgaaatttcgtttttattaaaaaaaaataataataataatataaaaattagtcgggggtggtggtaggtatttgtaattttagatattcgggaggttgaggtaggagatttatttgaatttgggaggcggaggttgtaatgagttgagatcgcgttattgtattttagtttggatgatagagtaggattttattttaaaaagaaaggaaaagaaaagaaaaaatattaaatgtgtacgttttttgatttagttgtattattttaaggagttgatattattaaaattgtttaagtgtttaaaggtgtttgtagttaaataataggagattgataaattatgttatatatatgtgatgttatgttttaaagaggtattgatatgataaaagatgtacgtggtataaaattaaatgtattttattaagtatttttttaagtgtttacggaatgagtgtatttttgaaaaaaaaaaagtgtattcgaatttttaaaaaagttttaaaagttttatataatgaacgattgagtgattataagagttggcgggggaatgttaagaggatgatagggagttaagtttaatagaataatttatttttttattttgtgatatttacgagcgtattaattttgtaattgaaaaataaagtgtatatttgtagtagttgtattttttttaggttgtaaggaggttttttttttcggtaggtttgatttgtattttatttttattttcgtggttggaaattttttatttacgtagtgggaggttgaggagttattataaagttggggtttgacgagtcgggatcgggattcgatttttatatatgttcggatttgttttgcggtcgggtttaggagttaaagaggcggggagatttgcgcgacgttgtttcgttttgcgttcgttttttttaatgtatgttttagggggcgggtttcgcggggagtatggatacgattggttttaaagtttttttcgtaaggtcgtgggttggatagcgtggtgacgtcgtaacgcggcgtagggtgagagcgcgcgtttgcggacgcggcggtattaaacggttgtaggcgtagtagagtggtcgttgtttttttaggttttagtcggtcgtcgcgacgttcgttcgttcgttttgaggtttttgaagtcgaaattagttagatttttttttttttcgtttgtttgtagcggcgttgttgttatttcgttattatgttcgaggcgcgtttggtttagggttttatttttaagaaaggtgttggaggtatttaaggattttattaacgaggtttgttgggatattagttttagcggtgtaaatttgtagagtatggattcgttttacgtttttttggtgtagtttattttgcggtttgagggtttcgatatttatcgttgcgatcgtaatttggttatgggcgtgaattttattaggtgagtttcgcggtttcgggaagtcggtttcggttcgtttgtattttcggtgtttggcgggagcgttttcgagtttagtttttattggttggcgtgggttattcgcgtttttttattggtttgttacgtagtggggtggggtttagttgagcgcgcggttcggaaaagttcgcgttggttgttgcgcgaatttgttttttcgcgttaaagttataaagcgggtggtggcgggaaaattaagggttttttcgtagtgttaggaatattgttttagggttttttgtttattaaattttgttggttttgaatggacgttttagttgtggtttttttgtttttgagacggtttcggtgtgttgttcgggttggtttttaatttttgggtttaagcgattttttcggtttagtcgcggttgattttaaatgttttataatgtttttgcgagaaatgtggtagtttgttattttatttagtggtaggagattgtttttatttagaagggatattgttggtggtattttagtataaatattgttagatgcgttttaaaacgtttgtattaataatggtattttttagtagttcgtttattttttattagttttgagacggtttgatgggtgagagtggtaattttttttaatcgcgttcgaaatatagttttttagtagacggcgttgattttaaagtatgtgttttttgttttttagt

SEQ ID NO: 247 - DNA, 5952 bp, Artificial Sequence
  chemically treated genomic DNA (Homo sapiens)
attagaagataggagatatatgttttaaaattaacgtcgtttgttgaagggttgtatttcgaacgcggttagaaggggttattatttttatttattaggtcgttttagaattggtggagggtaagcggattgttggaggatgttattattaatgtagacgttttgggacgtatttggtagtatttatattaaaatattattagtagtgttttttttggatagaaataattttttgttattaagtaggatgataggttgttatatttttcgtaagggtattataaagtatttaaagttaatcgcgattgagtcgggaggatcgtttgagtttagaagttggagattagttcgggtaatatatcgagatcgttttagaaataagaaagttatagttaaagcgtttatttaaggttaataggatttagtgagtaaagagttttggaatagtgtttttggtattgcggaaaaatttttgattttttcgttattattcgttttgtgattttggcgcgaaaaagtaggttcgcgtagtagttagcgcgggttttttcgaatcgcgcgtttagttgggttttattttattgcgtggtaggttaatgagaaggcgcggatggtttacgttagttaatgagggttaggttcgaaagcgttttcgttaagtatcggaggtgtaggcgggtcggggtcggtttttcggggtcgcgaggtttatttggtgaggtttacgtttatggttaggttgcggtcgtagcggtaggtgtcgaagtttttagatcgtagggtgagttgtattaaagagacgtgggacgagtttatgttttgtaggtttatatcgttggagttaatattttagtaggtttcgttgatgaggtttttgagtgtttttaatattttttttgaggatggagttttggattaggcgcgtttcgaatatggtggcggagtggtaataacgtcgttataggtaggcgggaaggaggaaagtttagttggtttcggttttaggagttttagagcgagcgggcgaacgtcgcgacgatcggttgagatttagaaagataacgattattttgttacgtttgtaatcgtttaatgtcgtcgcgttcgtaagcgcgcgtttttattttgcgtcgcgttgcgacgttattacgttgtttagtttacggttttgcggggaagattttagggttaatcgtgtttatgtttttcgcgaggttcgttttttagagtatatattggaggaagcgggcgtagggcggggtagcgtcgcgtaggttttttcgtttttttgatttttgaattcggtcgtagaataagttcgggtatatgtggagatcgggtttcggtttcggttcgttaagttttagttttatggtggttttttagttttttattacgtgggtagaaagtttttagttacgaaagtgaaagtgaaatgtaaattaagtttatcgggaggaaaagtttttttgtagtttgaagagagtatagttgttgtaaatatgtattttattttttaattatagaattgatgcgttcgtaggtgttataagataaagaggtgaattgttttgttaaatttagttttttattatttttttaatattttttcgttagtttttataattatttaatcgtttattgtataaagtttttaaagtttttttaaaagttcgaatatatttttttttttttaaaaatgtatttatttcgtaaatatttggaaaagtatttaataaagtatatttaattttatgttacgtatattttttattatattagtatttttttaaaatatagtattatatgtatataatataatttattaattttttgttgtttaattataaatatttttgagtatttaggtaattttggtgatattaattttttgaagtaatatagttgagttaaagagcgtatatatttaatatttttttttttttttttttttttttttgagatggagttttgttttgttatttaggttggagtatagtggcgcgattttagtttattgtaattttcgttttttaggtttaagtgagttttttgttttagtttttcgagtatttgggattataggtgtttattattattttcggttaatttttgtattattattattatttttttttagtagagacggggttttattatgttggttaggttggttttgaatatttgatttgaggtgatttatttgtttcggttttttaaagtgttgggattataggcgtgagttattacgtttagttagaaatttttaattgttataggatggataggatttgttgttttttttttgttttttttatattatttttttttagttatttttaatattttggttagtagaattttttagtttttttattatgtatttaggtatggagttagttttatttgttttgttgagggaattgaagatttattttaagtttgatatatttttaattattatggttttaaatattttttttttttagtttattttttatttttggaatgttttttttttttttttttttttttttttttttttttagtttagttgtgattttatataaggttttaagatgagttttatagttttttttttggattttgtggagatttaattttatttttttgtattagttttttaaagtattgggttagttttaaaagggaataggaaagggtatttttattataagatgtttttaattgtaatatgtattattattttatgtagtataagtaagaaaattgttaaatttttttttttattattttttagagaggggagtttttttttgatatttaggttggagtgtagtggtaagatgattatttattgttatttttaatttttaggttcgagagatttttttgttattttttaaatagttgggattataggggtgtattattgtatttggttaatttttaaatgtttttgtagagagaaggttttattatgtcgttttggttggtttttaatttttgggtttaagtaatttttttaatcggttttttaaagtgtgagattataggtatgagttattgtgtttagttttaaattgttatataatgttttattatttagaattttttttttttttttttttttttttttttttttttttttttgagatagagttttattttattatttaggttggagtgtagtggtgtgattttggttaatcgtaattttcgttttttgggtttaagtaatttttatgttttagttttttgaatagttaggattataggtatgcgttattatatttggttaatttttgtatttttagtagagacggggttttgttatgttggttaggttggttttgaatttttgattttatgtgatttgtttgttttggttttttaaagtgttgggattataggtatgagttatcgcgttcgggtttattttgttttaaaagaatttttagattttaaaaatattcgtttatataataatattttggtttaatgttaaattatatgtaatagatttgaagatattttaaatgataaattttatttatgggggatttattatgtatattaatttgtttatttttgttttattatagaagtgatgtttttttaaaagtgttaaatgataaagaggtgtatagttacgtaaattttatgttaaattgaaatgaggatataaatatgtttatgattgtggttagagaaggtttttttgaggaggtagtattttattagagaagatagttgtttggagagttggaaaaaagtattttaggttgagagaatagtatgattataaaggttagtatatttggaatatatttagataagtttgatgtagaatttagattgatgtgtttgaagtaagagtggtgtaaggtgaggttgtagagaggttggggtgagtttttgtaggattttgtaggttttttaaaagtgtaagggaatgtggttaatagtagatttttgatgtgatttaatttatattttaagtggttattttaatatttagtaaaggtattattggattagtgggagaaagaatgaagtaaattttgattagataattggttaaattattagaaaagaataaaagttgtagatttttttggatgggcgtagtggtttatgtttgtaattttagaattttgggaggttgaggtaggtggattatttgaggttaggagttcgagattagttaggttaatatggtgaaatttcgtttttattaaaaatataaaaattagttgggcgtggtggtgtatatttgtaattttagatattagggaggttgacgtaggagaattgtttgaattcgggaggtagaggttgtagtgaattaagattgcgttattgtattttagtttgggtgatagagtaaatttttattttaaaaaaaaaaaaaaagattttttttaataattatttattaaattttagataaagaatttaaatttaaattttgatttaataagaaatggaaaaatattttggtaaatatttatgagatttttttatgggtttttaaatataagaaaaaaatttataaaatataatgaataattatataagttttaagattttagtatgttttaaaggattatattggttagtatagtttaggttttagtgatagagaatttaatttgaatggattaagagaaatagaaaatttatttatttaaataaaaagttagaggtatttggtttttattgtttagttttagtttttataaacgtgaagtttgttagttatattaataagtaaagaaatgtaaatttaatggagatagaattttaatttattaaattaataaaaattatgttaatatttggtgtgttaggaaggatttaaggaagtaggtatttaaatatattgtaagtgggagtatatattggtataatttttttggtggaaatttagaaatgtgtattaaaagttttagaattttatttattttttgatatagaaattcgatttttagggtttttttttatagaagaaattaggggtatttattaagattaagtatgtttaagaatgttttttgagttaggtgtagtggttgatgtttgtaattttagtattttgggaggtttaggtgggcggattatttgaggttaagaatttaaaattagtttgatttaaaatttttgtttttattaaaaatataaaaattagttagttgtggtggcgggcgtttgtagttttagttattcgggaggttgagataggagaattgtttgaatttgggaggcggaggttgtagtgagtcgagattatattattgtattttagtttgagtaataagagggaaattgtttaaaaaaaaaaaataaaaaataaataaaaagaaaataaaaaacgaaaagagagagagagaagggttttaaagttggtttaaagttttattagtattatttttattagatttttgttcgttatatagtattgattttaggaatatatttgatttgagttttattaatttgagagggttgagtgtaatggatgagaagtttgtttagattatatgttatttattttagtaattatattgtgtattttataattttgatttatgtgtattgattttttaagtttttttttattaggttggatttgaaaaggagtagttgagtttttagaaggattgatatgatatttatttagatatgattttttatatttacgtgtttttgaaggtgaagttttagatattaatatttttatttgttttagaagattattttgttcgagtgttgtggtttatgtttgtaattttagaattttaggaggtttatgtgggaggattgttcgagtttaggagtttaagattagtttaagtaataaagtgagattttatcgttatataaaaatttaaaagttagttgggtgtggtgttgtatatttgtagtttaagttattcgggtatatatttatatagaaattaggaatat

SEQ ID NO: 248 - DNA, 6664 bp, Artificial Sequence
  chemically treated genomic DNA (Homo sapiens)
tattataagggtattaattttattaatgagggaaaagttttcgaggtttaataattatttttcgaaggttttattttttaatattattattttggggtttaagttttaatatatgtatttaggaggggtatatatttttaaattatagtaattcgtaagtgatatatattttaggttttatggaatttatatttatttttggttatatttagttacgtggatgttttatagtattttattattaatatgtttaaagtgatgttttatgttttatagttgttttttagtatttttttagaatagtaggatttttagtttgttgtaaagttatatatttaagttatttttgatgatttttttttttttttttaatttagttttagtttttaaaaatattttattgttattttttttttttgaaattgatatttttttaagtttagtatttgttgggattgttgtagagttttttattgtttgttggttttgatgttgtattattagttttttttatgattttttttttttaatttttatttatgattatgttattgttttgtttatatttttttgtttaagtttaacgtttaatttaaaatttttagtatgattttgaatattatttttaaggtatagatattatttaattatttagtttaatgtttatgatttttgttgagtatttagattttgtttatgtttagcgtattgaattaattttagtttataaatttgtattgtttttttttgttaatggattaagttttttatttttatttgtttttttggtaaattttttttattttttaagatttagtttagttaattttgttatgaagttttgtttgatgttttttttattatgttttgtatatagtagtttttattatattgtattgtaaatatttgtattttatttaggtggaagatttatagttatttatttgttatttttgatttttattagttttaaggttgatatatgaattttttttttttatattatgtttagtttttaaaattttaatgagagattaaggtgggttgatatgtatgtatttaaagtataattattaataggtttaaagtgatttttttttttttttgtggggcgagaatgaagatagggggtatggaggttgtatatgataaatttttattatttgtattttatattttggattattttttaaaatttatagaaaaattatattatttttataattagaaaaatatttaattttgttatagtaacgatagtttagtatttttatttgtggtgaaaagatttgaatttatatattttgtattttttgttatttttttttttgaattaatatgaaaaaggataaattttttttttttgtatatatttttcggtaatttttaaattttttttttttttttatatatttgtttgtatagagatagggttttattatgttgttaagttggttttaaatttttggttttaagggattttttattttggttttttaaagtgttgggattataggtgtgagttattgtgtttggttaatttttattatttttatttagtagtaatggaggttttggtaagattgatttatttatttatttatttattcgtttatttttgggttagggtagtatatttacgtggtttaatatttaaaagatataaaatttttttttttatttttgtattaggttatttttgtattttatagagggtatatttttattagttttttttatttttttttcgaagtgtatttttttttttttttttttttttttagaaggagtttcgttttattattaggttggagtgtagtggcgttatttcggtttattgtaatattcgtttttagggtttaagcgatttttttgatttagtttttcgagtagttgggattataggtatgtgttattacgtttagttaatttttgtatttttagtagagatgggtttttattacgttggttaggatggtttcgattttttgataacgtgatttattcgttttggttttttagagtgttgagattataggcgtgagatatcgcgttcggttcggaggtgtatttttaagtaaatgtttttatattttttttatttaaaaaaaatatttgttttgatttgggttgttataataaaatgttatagattacgtgttttaaataataaaattttatttttatttagttttggaggtttggtgtgtaagtttagagggcgggtaatattaggttttggtaagggttgatttttttattgataggtgtttttttattttaattttatatgagagtaattaagttttttagcgtttttttttataagagtattaattttattacgagggttttatttttatgtttttatttaaatttaattattttttaaagttttatttttaaatattattttagtggggtgaggtttttaacgtatgaattagcggggtggggggataataaatatttagattatagaaatacgtaaatataagaaataaaattaaaaagatttatgtgtaatattaattgatttttttttttttttttaaaatggagtttattaaaatataaatatgaagttttttagagtatatatttttttttgtttttttttgtagtttttttttttttaatattatttttagggtagtttttttaaaatatggttttaaggttgtgtgtattttttttgtttagattttttggaatagtgtttagcgtttattaggattttgattgtaaatttttttttttgattttaatattataggatgtagtattttttatattttattatggggggtattttgaattatttgggttgattttttggtttttgtgttttatttatataattttttttgtatggaaggtttattttagaattttttttttagtttttgtttaaatgttatttttgttagtattagtagtttttttttttgggtttttatattgttttgtaatataagttataaggtaagtattagaagagaatttttaattattattttgtttttttatttttaatatttttagcggtaattgtattttatttatttttgtgtttatgaagtatagtgttgtattttggagatattatatagaagttggtttaaagggtaataaattgtatttgttaagatgatagtatggatttataataatttttgaaattttataaagaaagatgattgagttaaattgatatatttagtattatagttgtggaagtttgtggttttttttatgttaaaggtaaaatggatataatgaattagttgttatttttagatgatatagaagttgaattttttttaagttttttaaagagaaagatatattaaaatttattaaaattagtattataaattgtatagaatagtttggttttttagagtatttttttggggtagtgagtttttatttaaaaaatgaagtttggattttaaatataagttttaaaagtgattaggttttagtaggagtttttaaatttttatttatattatgatttttaaatgttttgtttttgttgtttaggaataaaaattgttaaggttgagttagatgtaatgtataatattagatgatagatgtagtttattgtgttaaaaggtgttaaatatttaagtgtatgtgatatattttatattataagggtaaggaagttttattttatattttgatttgggttttttaatatatatttgtagtggatgtggtaattagtttttgttttatgttttattaggattaatgtaattagaaatttttaaaatggatttttattatgtttagttttgttttattgttttatttgtttattttaaaaagattttagaatggtgtttaggttgggttggtggtttacgtttgtaattttagtattttgggaggttaaggtaggaggattgttggagtttaggagttggagattagttagggtaatataaggagatattgttttcgtaaataaatagaaaaaaaaaaagtaagaaagaaagagagaaagaaggaaagaataagaaaaaggaaaaaaaaattaattgtagtaagtgtagaaattttttttaaggatatgatggatggtaatgaagatagagtttttgatattggattatttaaagtataatttaagtttttttttttttttttatagaattgtgaatttttgtgttttaattatatttaagttaggcgtggtggcgagtgtttgtagtcgtagttgcgttggaggttgaggtcgattgtttgagtttaggatttggaggttagtatgcgtaatataatgagatttagtttttaaatgtatgtttttttttatatatttaaaattttgatgtgaaaatattttaaaatttaatatattttaaatgtttttaattgtataataaataaaatgtaaataataaaataatttaatattaaatttaaaaatgaggtagaaataaagtatagcgatataaataataaatttttttttatatttttgaggcggttttttgagttttttattttttttttaaggttattgaaatgtgttttttggagttagttcgtaaattacgtatttagaaaaatataattatatatttttaattttaagtattagaagtgaaagtaatggaatttcgatgtaaatataatattatttttttgatgagttattttgagtataataaatttgaattgtgttaatgttgggagaaaaaatttaaaagaagaacggagcgaatagtagttttttgtttcgttgattagaaatagtaggacgatattttttcgattggaggagagcgtttgcgttcgtatttagttggcgttcgtttttttgttttttttttagtcgtttttttttttttttttcgcgttttagttattcgggaaggtttgtttagcgtagttgggttttgattggttgttttgaaagtttacgggttattcgattggtgaattcggggttttttagcgcggtgagtttgaaattgttcgtatttggttttaaagttggtttttggaaattgagcggagagcgacgcggttgttgtagttgtcgttgcggtcgtcgcggaataataagtcgggtatagtggttggggttagggtcgtgtttaggggacggtcgagggtttcggagggcgagtattgaggaacggggttttttaagaaggtcggattggaggttagggatttgcgcggggttcggttgggtttcggggggcggtgggtagggttttcgtttgggtttggtcgtgtgagttatattgggttggttttagagggaggttatgggagtttagtttggcggggttaggcggcgtgggggtgggggttcggggttgtagttatgagtcgaggtcggttgtttttaggaattgtttgaagaggttttcgggttttgattgaagtaaaattcgtttttttacgttgagcgtttgcggagtagtaggtttttttttgggttcggtttttgcgcgttttgttatttcgtttcgggggtgggaaagtgggatcgtatttgggttaggtataggcgcgggtttttagagttaggtcgttttgagaaatcgattttggaattcgtgggtttttttgggtttgttttgtttacggtttcggtttatttggagttgttaagaatagttagtttaggtatttaatttttatgagtagtgtagtgtagttttttttatttaaaaagatatatttttgtttttttttggattgatttttttttgaagatgaatgtgagaaatagaatttaaaggtttattttgagtgtgttttataaatgattttattattagtgatgggtgttagaaaaatttaggtaattatgtttggagttttgacgttttattggtaaattttagaggaagttttgaatttttggttgttagtttttttttttaatttatttattgtgatttaagtatatcgtttttttgtttagtttttgatattgtttaggttataattagaattttatttgtggaattgtattttttatttttttgttttacggtgtttaagtgatattttttatttttggaaaaagtattttgaaagttttgagtatgtttgtttgtgattttagtaagtagaggaaaaagattaaaattgttacgtgggtaattgtaaatatttaaaatgtttttgtcgttttaaataaaatttttttaatgaatagtttgaatatattttagttttgtttttataattttaaaaaataatgttttgaataaaattaggagtattataaagcggtataaatttgttgaaatatttgggtataattttggtatacgtaggtattattttaaagtgttataaaaagggaatataattttggtttttgtttggaaagaatagataagttgatatttgaatttgagggttattttgattggaagaagttaaatattatattagtatagaatatatacgtttttaatgttttaggagttaagaaggatggaaagttattgtaggagtttttatttttgtaaatattgtttgaatgtaattaatatttatggaatatttatgttgtagtaggtattgtggaaaatgttttatatatagtgttttattaatgtttaaaattattcgagttagtggtatgtaattaagttagttttttttttattttagg

SEQ ID NO: 249 - DNA, 6664 bp, Artificial Sequence
  chemically treated genomic DNA (Homo sapiens)
tttaaagtgaaggaaaaattgatttaattatatgttattaattcgagtagttttaagtattaatgaaatattatatgtaaagtattttttatagtgtttattgtagtataagtattttataaatattaattatatttaaataatatttataagggtaaggatttttataataattttttattttttttgatttttgagatattggaaacgtgtatattttatattagtgtagtatttagttttttttaattaaaataatttttaaatttaggtattaatttgtttattttttttaaataaaaattagaattatgttttttttttgtgatattttaaagtagtatttgcgtgtgttaaagttatatttaaatattttaataaatttatatcgttttatgatatttttaattttatttaaaatattattttttaaagttatgaggatagaattaaaatgtgtttagattgtttattaggaaaattttgtttaaaacgataaaaatattttaagtgtttatagttgtttacgtgataattttaattttttttttttgtttgttgaggttatagataaatatgtttaagatttttaaggtattttttttaagagtaggaaatattatttaagtatcgtaaaataaaagaatgaaaagtgtaattttatagataaaattttaattataatttaaataatgttaaggattaagtagaaaaacggtatatttgaattataatgaatgggttaaaaaaaaaagttgataattagaagtttaagattttttttgaagtttgttaatgaaacgttagaattttaggtataattatttagatttttttaatatttattattgatgataaaattatttataaagtatatttagaatagatttttaagttttattttttatatttatttttaaagaaaaattaatttagaaagaagtagagatgtatttttttaaatgaaaaaaattgtattatattgtttatgagagttaagtgtttgggttgattgtttttaatagttttaggtgggtcggggtcgtgggtagagtaagtttaagaaggtttacgagttttaggatcggttttttagggcggtttggttttagggattcgcgtttgtatttggtttaggtgcggttttatttttttattttcgaggcgggatggtagggcgcgtaggggtcgggtttaggaaagagtttgttatttcgtaggcgtttagcgtgggggagcggattttgttttaattaagattcgaaagtttttttaggtagtttttgagaatagtcgatttcgatttatgattgtagtttcgaatttttatttttacgtcgtttaatttcgttaggttgggtttttatagtttttttttaaagttagtttagtgtggtttatacggttagatttaggcgaaggttttgtttatcgtttttcgaggtttagtcgggtttcgcgtagatttttgatttttagttcggtttttttagaggatttcgttttttaatattcgtttttcgaggttttcggtcgttttttagatacgattttgattttagttattgtattcggtttattatttcgcggcggtcgtagcggtagttataataatcgcgtcgtttttcgtttaatttttaagagttagttttgaagttaagtgcgagtagttttaaatttatcgcgttaaagggtttcggatttattaatcgggtagttcgtagatttttaaagtagttaattagagtttagttacgttgggtaggttttttcgggtggttagagcgcgaaagaaagaggaaagggcggttagagaaaaagtaggagggcgggcgttaattgagtgcgagcgtaagcgtttttttttagtcgggagagtgtcgttttattgtttttagttagcggagtaggaagttattgttcgtttcgttttttttttaaatttttttttttagtattggtatagtttaaatttattatatttaaaatagtttattaaaaaagtgatattgtgtttatatcgagattttattatttttatttttaatatttagggttaggagtgtatagttatgtttttttaaatgcgtgatttgcgggttggttttaaggagtatattttagtgattttaagaaggaaatggaaaatttaaaagatcgttttaaaaatgtaaaggaaaatttattatttatatcgttgtgttttgtttttattttatttttgaatttaatattaaattattttattatttatattttgtttattatataattaaaaatatttgaaatgtattaaattttaaaatatttttatattagaattttaaatatatagagagaggtatgtatttagagattgggttttattatgttgcgtatgttggtttttaaattttgggtttaagtaatcggttttagtttttagcgtagttgcgattataggtattcgttattacgtttggtttaaatataattaaaatataaaaatttataattttatgaggggagagaaagaggtttaaattatgttttaaataatttagtgttaaaaattttgtttttattgttatttattatatttttgagagagatttttgtatttattgtagttaatttttttttttttttttttgtttttttttttttttttttttttttttttattttttttttttttgtttgtttgcggagataatgtttttttatgttgttttagttggtttttaatttttaggttttagtaatttttttgttttggttttttaaagtgttgagattataggcgtgagttattagtttaatttaaatattattttaaaatttttttaaaataaataaatagaatagtaaaatagagttagatataataaaaatttattttaaggatttttggttgtattgattttaatgggatatagaataaagattgattattatatttattataagtatgtattagaagatttaaattaggatatggaatggaatttttttatttttgtgatatagagtatattatatgtatttaagtgtttaatattttttaatataatgagttgtatttattatttggtgttatatattgtatttggtttaattttgataatttttgtttttaggtaatagaggtagagtatttgggagttatggtgtaggtaggaatttaagaatttttgttggagtttaattatttttaaaatttatgtttaaaatttaaattttattttttaaatgaaaatttattgttttagagaagtgttttagggaattaggttgttttgtgtagtttatggtattggttttaatgaattttaatatgtttttttttttgagaggtttaagaggaatttaatttttatattatttaaaaatggtaattaatttattatatttattttatttttaatataaagaagattataagtttttatagttgtgatgttaggtgtattaatttaatttaattatttttttttataaagttttagaggttattgtaaatttatgttattattttggtaaatatagtttattattttttgggttaatttttatgtagtatttttaaagtgtaatattgtgttttatagatataaaaatgaataagatatagttatcgttggaggtgttgagggtaggggagtaggatgataattgggaatttttttttggtatttattttgtaatttatgttatagggtaatgtgagaatttagaggaggaaattgttaatgttagtagaagtgatatttgaataaaggttggggaaaggattttggagtgggttttttatatagaggaaattgtataagtagagtatagaggttagaaagttaatttaggtaatttagggtgttttttatggtagaatgtagggagtattgtattttgtgatgttaaagttagagaagggagtttatagttagaattttgatgagcgttgaatattgttttaaaggatttgagtaggagaggtatatatagttttggaattatattttaggaaaattattttagaggtggtattaaaaaaaaaaaaattgtagaggagagtaggggaaggtatgtgttttgaaaaattttatatttgtattttggtaaattttattttggaaggaaaagaaaagattagttggtattgtatataagtttttttggttttgttttttatatttacgtatttttatggtttgaatgtttgttgtttttttatttcgttaatttatacgttgaaggttttattttattgggatggtgtttggagatgaggttttgggaggtaattaggtttagatgaggatatgagggtggggttttcgtgatggaattagtgtttttataagaagagacgttgaagagtttggttgtttttatgtgaggttagaatgagaaggtatttgttagtgaggaagttagtttttgttagaatttgatgttgttcgttttttgaatttgtatattaagtttttagaattgagtgaaaataaaattttgttgtttaaggtacgtagtttatggtattttgttatggtagtttaggttaagataagtgttttttttagataagaaaaatgtgagaatatttgtttgaaaatatattttcgggtcgggcgcggtgttttacgtttataattttagtattttgggaggttaaggcgggtggattacgttgttaggagatcgagattattttggttaacgtggtgaaaatttatttttattaaaaatataaaaattagttgggcgtggtggtatatgtttgtaattttagttattcgggaggttgagttaggagaatcgtttgaattttggaggcgaatgttgtagtgagtcgagatggcgttattgtattttagtttagtgatagagcgagattttttttaaaaaaaaaagaaaagaaaagaaaatatatttcgggaaggaggtggaagaaattaataaaaatgtgttttttgtggaatataagagtgatttggtatagaggtggaaaggagagttttgtattttttgaatattgagttacgtgaatgtattattttagtttaaaaatgaacgaataaataaatgaatgaatgaattagttttgttaaggtttttattgttattggataaaaatggtaaaaattggttaggtatagtggtttatatttgtaattttagtattttgggaggttaaggtggaggattttttgaggttaggagtttgaggttagtttggtaatatagtaagattttgtttttatatagataaatatataaaaagaaaaaaaaaatttaaaagttgtcggaaaatgtatgtaaaagaagaagatttatttttttttatgttaatttagaaaggaaagtgatagaaaatataagatatatagatttaggtttttttattataagtgaaaatattgaattatcgttgttatgatagagttgggtgtttttttgattataaaagtaatgtgatttttttgtaaattttaagaaataatttaaagtgtaaaatatagataataaaagtttgttatatataatttttatgttttttatttttattttcgttttataaaaagagaaagagattattttaaatttgttggtagttgtattttaaatgtatatatgttaatttattttaattttttattggaattttagaaattgggtatggtgtagggagaagagatttatatgttaattttgggattaatgaggattaaggataataggtgagtagttgtggattttttatttaggtggggtgtaaatgtttataatgtaatatggtgaagattgttgtgtgtagaatatagtggagagggtattaggtaaggttttatagtaaagttgattgaattgagttttaaggaataaaaagagtttgttaagaagataaatgaaggtggagagtttgatttattgataagaaagaataatgtaagtttgtagattgaaattaatttagtacgttgaatataaatagaatttgggtgtttagtaagggttataaatattaggttaggtagttaaataatatttatattttgaaggtaatgtttaaggttatgttaaaagttttggattagacgttggatttgaataaaaaaatgtgaataaggtagtgatatggttataagtgggagttaggggggaaaagttatgaagagggttggtgatgtagtattagagttagtagataatggagggttttgtaatagttttagtaggtgttgaatttggggagatgttagttttaagaggaagaaatgataatgagatatttttaggagttgggattgggttaaaaaagggagaaggagttattagggatgatttgggtgtgtggttttgtaataggttgagggttttgttgttttagagagatgttaaggggtagttatggggtatggagtattattttgggtatattgatagtgaagtattgtgggatatttacgtggttggatatggttaagggtaagtgtaggttttatagggtttgaagtgtatattatttgcggattgttataatttgaaggtatgtgttttttttaaatgtatatgttggaatttaaattttaaggtgatggtattaagaggtagggttttcgggaggtgattattaaatttcgagggttttttttttattaatgggattaatgtttttataata

SEQ ID NO: 250 - DNA, 6815 bp, Artificial Sequence
  chemically treated genomic DNA (Homo sapiens)
ttgtttgcgaattaaaaatttagagtttttttgtgaattatgttgttaagaattgtagatttaagttttaagattgtacgaatttaaattttgattttatggttttagttggtatgaagatataaagataattttttagtaaaaatagttttgaaagatcgggcgtgatggtttatgtttataattttagtattttgggaggttgaggcgggtggattatttgtggttaggagtttaggattagtttggttaatatggtgaaattttgttttaattaaatatataaaaaaattagttgggtgtggtggcggatatttgtaattttagttatttagggaggttgaggtaggagaatcgtttgaatttaggaggtagaggttgtagtgagtcgagattatattagtgtattttagtttgggtgataaaagtgaaattttgttttaaaaaaaaaaaaaaatggtagaatgttatatggaaagttaatttttagagatagtaatttagatatttataatattatattgtttttttaagtatttatattaataaattaattaatatttgttgatttaatatggttagggatagtgttgggtttttataatttttaagtaattttagttagattttgtttttaaggagtttatgagtagtatgaggagataaaaaatagataaataattttaatttaggaagaatttgataaatgtatgataattattattagaatttagaggagaggaaattttttttgaatagagattaaaggaaggaataatgaatgtggtagtatttgggttggatttattataagaggtatgtttttttttgataagttaagaaagtggggatttaaggtagaagaaaagaaaagttttgagtttttggagtattaaaattttgtttggttgaagtataggttatagtcggaggagatggattaggaaggatcgttatgggtagagaggaagttttgaatttatgggggaagttatgatttgggttaaagatagagttgggttatgttaagatggattttgaagtagtaaaaaaaaatttaagaaagtaaataggttgtagggtttaggatgaagttcgggaggaaagggtagagtggtttttaggaggtcgttaggataggtaaggtaatgggttttaaagggagtggtcgaaatgtaatggaaaaagagagattgtaaagttagaaggtttaggaattgttttttgattaggtgtggaaggtaagggaaaattagttttcgaagaagatagtgagattttaatttgggtggttggagagatagtgatgttgggtatagatacggggaagttgagaggaatattatgtttgagaatggtgatttatatttgaataagtttgtaatgtttagtagatcgttggaaaagtggggttggagatatatttaacggaggagttagattaatttttatttttttttatttgagagagttagtaagttacggttggaacgtgtgtgtttagtaggagagggtagggagggaagttaagagagttgggagttcgagtgaagtttttgttaaaggtagaagaggaaagtcggcgtagtatagtatatttttttatttatgtttattaagtttagggataaggtttattaagatgagtttggaagagaatgttggagagaaagtggttaagaaaattgtttttattgaattttttgggttaattttgattgtaagtttttgaataattaaagtttgtgaggagatagttaatttttttattttttttatgttaatagtgaataattgtagatttttttttttttttttttttttttttttgttttttttttttttttttttgaatatttttgtttttttttgggattggtttagagtatgggtggttattgttgatttataggaggtattattgttattaataaagggtaatagtttttttttttaatatttatttatatttagtatttatttttaatattgattatggagagagtttttttgtgtttaaatattgtaatattgggggttttttaaagtataaaaatatatatttgtatgatggtattattaatatttttatggttttttattttttttttgtattggttttaagagttatttataaattttttagtaattgtatagtgttttagggttagagatcggttatttttggtattgtgattagagttatttaatatttaaggtggtgattaatgtttggtaataaagtttttattgggtgttatgtgttttgggattttgagcgtgggtattttaggagtattttagtattgcgtgttagtattatggtcgagagaatagttgagaaagtggttaagaggtggatttatgtgaacgttattgggaaatgagagatttcgtttttaattacggttagtgtaattcgaaagtttaaaattagtttaaaataaaggtatttatttttattttatgtttatattttaggtttttaataatacgtattttttatatgtttatagaaagtagttaattgagttatttatggaaaggtttgtgggtttggttaacgaagtggaggagtattatattttagttggaaatatatttttagaatgttaaaatatttattttaaagtttggttttttggtgtaatcggaggtatggtaatgtttttgtttagagattgggggttagggttagtaaggtatttgatttatatgtattttagaaggtttttattgttaaattatattttttcggaaaaattatttatgttttattttgtaaatttgatatttatatatttttgattggtattttattttagtcgtaagattatgatttatagtaagtttgtttttttttttgtttggggtggtagtagaaagtatagggtattttttagtttttaagggtaggggtaaaggggttggggttttttttttttagtatagttttttttggttgtgttatattgttttttgtgagtagatagtaagtttttttttattttttattgttatttatttagcgttgtgtagtagtttagttgcgtgtttgtcgggaggggttgttaagtgttttgtttattggttgtttttcgaatttttgttattttacgtataaatatatttatatattttttttgtttagtttatatattgagttattcgtatatgcgagtatatttttttttttttttttattttttcggtttttgatttttataagtttatggaatatttttggaaagacgtttttgatttagtagggtaggtttgttttgatttttttttttgtagttttagtattttgagaaagtaatttatttttttggttagtgtttgtattttagtagggagatgaggattgttgttttttatgggggtatgtgtgtgtttttttttttttttaggatttgtaggattttttgtgttatttgtatataatttggtaggtttatattttttaagagttttatgaagtgttttttgtatgtgttttaaaaaggtatttgaaaattgaaagtgtgatttatggaaattaaattatttgtaaaaaattgttttggaaagtaatgattgttggttataaagggaaatatttgcgatgtatttaatgtgtttttaattttttatttgttgataatttatagttattaatgttaaattcgattttggttttagttatatttgtatattgtttaataatggtttatttttgtaagaattagataaaatgtatatttgatataaaatagttaaaaatgtaatttttagtaatagtaagtttggtatttagatagattatgaatatttcgttagatattttgttgggtgtttgggatagtaattaaaataaagtattgatagttgtattagagtttattaggttgtagtaaaggaagtttatttaaaagtataaattatttaagattatagacgtatgatatattttatttattttttgtttttttaatatgtatatatatatatatatatatatatatatatatatatgtgtgtgtgtatgtgcgtgtgtatgtttaatttttaatttagttaaaaatttttttttatttgttttttatttggatatttgattttgtatattttagtttaagtgaatcgagaagatcgagttgtaggattaaaggatagatatgtagaaatgtattttaaaaatttgttagttggattagatcgataatgtaatataattgttaaagttttggttcgtgatttgaggttatgtttggtatgaaaaggttatattttatatttagttttttgaagttttggttgtataattaatttgtggaaggtatgaatatttatgtgcgttttaattaaaggtttttttgaattattttttatatgagaatttttaatgggattaagtatagtattgtggtttaatataaatatataagttaggttgagagaattttagaaggttgtggaagggtttatttattttgggagtattttgtagaggaagaaattgaggttttggtaggttgtatttttttgatggtaaaatgtagttttttttatatgtatattttgaattttcgtttttttttttttagatgttttttgttagtttttttagttgttaaatatagttgtttgtggttggttgcgtatgtaatcgtatattttattttatttgttttatttcggttatagtgtagttttttttagggttattttatgtatatattacgtatttttagttaacgaggagggggaattaaatagaaagagagataaatagagatatatcggagtttggtacggggtatataaggtagtatattagagaaagtcggtttttggattcgtttttcgcgtttattttaagtttagttttttttgggttatttttagtagattttcgtgcgttttcgttttttggtcgtgaaatttagtttttatttagtagcgacgataagtaaagtaaagtttagggaagttgttttttgggatcgttttaaatcgagttgtgtttggagtgatgtttaagttaatgttagggtaaggtaatagtttttggtcgttttttagtatttttgtaatgtatatgagttcgggagattagtatttaaagttggaggttcgggagtttaggagttggcggagggcgttcgttttgggattgtatttgttttcgtcgggtcgttcggttttatcggattcgtaggttttcggggtagggtcggggttagagttcgcgtgtcggcgggatatgcgttgcgtcgtttttaatttcgggttgtgttttttttttaggtggttcgtcggtttttgagttttttgttttgcggggatacggtttgtattttgttcgcggttacggattatgattatgattttttatattaaagtatttgggatggttttattgtattagatttaagggaacgagttggagtttttgaatcgttcgtagtttaagatttttttggagcggtttttgggcgaggtgtatttggatagtagtaagttcgtcgtgtataattatttcgagggcgtcgtttacgagtttaacgtcgcggtcgtcgttaacgcgtaggtttacggttagatcggttttttttacggtttcgggtttgaggttgcggcgttcggttttaacggtttggggggtttttttttatttaatagcgtgttttcgagttcgttgatgttattgtattcgtcgtcgtagttgtcgttttttttgtagttttacggttagtaggtgttttattatttggagaacgagtttagcggttatacggtgcgcgaggtcggttcgtcggtattttataggtattcgcgttcgcgtcgttcgtcggggtggtcgtcgcgttcggtaggagggagggagggagggagggagaagggagagtttagggagttgcgggagtcgcgggacgcgcgattcgagggtgcgcgtagggagttcggggcgcgcggtttagttcgggggttttgcgtgtagttcgcgttgcgtttagagttaagttttttcgtcgggtagttgaaaaaaacgtattttttatttatttatcgttcgtgcgagaggtagattcgaaagttcgggttttttaataaaatatacgttggaaaattagataaagtagtagttatttgtgggggaaaatatttttaggtaaataaatacggggcgttttgagttatttgggaaggtttcgtttttggtatttaaagttgggggtgtttggagttagtagagtttagtagagttttatttatttttttaatgtttttgtttaatgtgttttttaaatttttttttatttagattatttgattggaaatatgttagttatgatgatgattttttgggaagcgatttttgttattcgttttttttttttttttattttacgttttggggttttagagagcgattgggagttgaatgggtttgatttcggagttagttggttgagttcgcgttggagcggattgttggtatgtgatttttgatagtcggaaatttgtaggtgtttcgcgagtttaaaataagttatatggaagtataagtgtttaaaaataattttttgttagtttagtgataagtttgttttattcggggagaatgtttcggagtggcgtgcgggttagttagggtttgcgtttcgtagttattgtggaaggagcgcggtcggtttaggatataggagattattttgtgattttaatggcgaaggttgtgtgtttttattttaatttttttttttataagaattgttttttttttttttttttttttttttatttttttttgtttagttttttttttt

SEQ ID NO: 251 - DNA, 6815 bp, Artificial Sequence
  chemically treated genomic DNA (Homo sapiens)
aaaaggagaaattgggtaagagaaaatgggagggagaggagagggagaaagaataatttttgtagggaaaaaaattaaaatgaggatatataattttcgttattgaagttataaagtggttttttgtgttttggatcggtcgcgttttttttatagtggttgcgaggcgtagattttggttgattcgtacgttatttcggggtatttttttcgggtgggataggtttgttattgggttggtaggagattatttttaagtatttgtgtttttatatggtttgttttaaattcgcgggatatttataaattttcggttgttagaagttatatgttagtaattcgttttagcgcggatttagttagttaatttcgaaattagatttatttaatttttaatcgttttttaaagttttaggacgtggggtggggaggaggggaaagcgggtgataggaatcgttttttagaaagttattattatagttgatatatttttaattaaatagtttagatgaaaggaaatttggggagtatattaaataaaaatattaaaaggataaataaaattttgttgagttttgttaattttaaatatttttaattttaaatgttaagagcgagatttttttaagtgatttaaagcgtttcgtgtttatttgtttggaggtgtttttttttataaataattgttgttttgtttggttttttaacgtgtgttttgttaggaagttcgggttttcgggtttgtttttcgtacggacggtaagtgggtggagagtacgttttttttagttgttcggcgagagaatttgattttgaacgtagcgcgggttgtacgtagaattttcgggttgggtcgcgcgtttcgggttttttgcgcgtattttcgggtcgcgcgtttcgcggttttcgtagttttttaggttttttttttttttttttttttttttttttttttgtcgggcgcggcggttatttcgacgggcggcgcgggcgcgggtatttgtagaatgtcggcgggtcggtttcgcgtatcgtgtagtcgttgggttcgttttttaggtagtagggtatttgttggtcgtggggttgtaggaaaggcgatagttgcggcggcgggtgtagtagtattagcgggttcggagatacgttgttgagtggggggaaattttttaggtcgttggagtcgaacgtcgtagttttagattcggggtcgtaggggaggtcggtttgatcgtagatttgcgcgttggcggcggtcgcggcgttgaattcgtaggcggcgttttcggggtagttgtatacggcgggtttgttgttgtttaggtatatttcgtttaggggtcgttttagggggattttgagttgcggacggtttaggggttttagttcgtttttttggatttgatgtagtagggttattttagatgttttggtgtggagggttatggttatggttcgtggtcgcgggtagggtgtagatcgtgttttcgtagggtagaaggtttagaaatcggcgggttatttggaaaaagagtatagttcgaggttagaggcgacgtagcgtatgtttcgtcgatacgcgagttttggtttcggttttgtttcgggagtttgcgggttcggtgaagtcgggcgattcgacgggagtaagtgtagttttaggacgaacgtttttcgttagtttttgggttttcgggtttttaattttaagtattggtttttcgagtttatatgtattataaaggtgttggaggacggttagggattgttgttttgttttgatattggtttaaatattattttaggtataattcgatttggagcgattttaaagagtagtttttttgaattttattttatttgtcgtcgttgttggatagaggttgagttttacggttagggggcgggggcgtacgaggatttgttaaaggtggtttagggaagattgggtttaaaataaacgcgaaagacggatttaggggtcggttttttttaatgtgttgttttatgtgtttcgtgttagatttcgatatatttttgtttgtttttttttttgtttgatttttttttttcgttggttagaaatacgtagtgtgtatataggatgattttggggaggattatattgtaatcgagatagggtagatagaatggggtgtgcggttgtatacgtagttagttatagatagttatatttagtagttgggggaattgatagggggtatttgaggggaagggggcggagatttagggtatatatataggaagagttgtattttgttattaggagaatgtaatttgttaggattttagtttttttttttgtaaaatgtttttaaagtagatagatttttttataattttttgagatttttttagtttgatttgtgtgtttatgttggattatagtattgtatttggttttattaggaatttttatgtgaaggatgatttagaaaaatttttggttagggcgtatatgggtgtttatgttttttataggttggttatgtaattaaaattttagaaaattgaatataaaatgtgatttttttatattaaatataattttaggttacgaattaaagttttggtaattatgttatattgtcggtttggtttagttaatagatttttaaaatgtatttttgtatgtttattttttagttttataattcgattttttcggtttatttgggttaggatatgtagaattaaatatttagatgaaaaataaatagaaaaaagtttttaattgaattaaaagttaaatatgtatacgtatatatatatatatatatatgtgtatatatatatatatatatatatatatatatattaaggagataaaaaataggtgaagtatattatgcgtttataattttggatagtttatatttttgaataaattttttttgttgtagtttaatagattttgatataattattaatattttgttttaattgttattttaaatatttaatagagtatttgacgaagtgtttatggtttatttaaatgttaagtttattgttattaagagttatatttttgattattttatattaagtatatattttatttaatttttataaaaatagattattgttggataatatgtaaatgtagttgaagttaaaatcgagtttagtattaatgattatagattgttagtaaataaagggttaaaaatatattaggtgtatcgtagatatttttttttatggttagtaattattattttttaaagtaattttttatagatgatttaatttttataaattatatttttaatttttaaatgtttttttaaaatatatgtaaaaagtattttatagggtttttaaaaaatgtgaatttgttaaattatatgtaaatggtataaagaattttataagttttgaaagaaaaaggagatatatatatatttttatggagaatagtaatttttatttttttgttaggatatagatattagttagaaaggtaagttgtttttttaaaatgttaaagttatagagagagaaattaaaataagtttattttgttggattaagaacgtttttttagaaatgttttatgggtttgtagaagttaagggtcgagagagtgagaaggaaggaaggaatgtgttcgtatgtgcgagtggtttagtgtgtgaattaggtagagagagtgtgtggatgtgtttgtgcgtggaatggtagggattcgggaagtagttagtaggtagggtatttggtagtttttttcggtagatacgtagttgggttattgtatagcgttggatgaatggtagtggggagtgaggggagatttgttgtttgtttatagggagtagtgtggtatagttagagaaagttgtattggggaggagaaattttagtttttttgtttttatttttggaggttggaaagtattttatgttttttgttgttattttaagtaagaggaaaaataggtttgttgtgaattatagttttacggttaaaatagaatgttagttaaaagtgtatggatattaagtttataaaataggatatgggtggttttttcgaaagaatataatttaataataaaagttttttgggatatatgtggattaaatgttttattggttttagtttttagtttttgaatagaggtattgttatgttttcgattgtattaggaaattagattttggaataaatgttttggtattttagggatgtgtttttagttgaaatgtaatatttttttatttcgttaattaaatttataaatttttttatgaatagtttagttgattgttttttgtaaatatgtgaaaaatacgtattattaaaagtttaggatatgaatataagataaaggtagatatttttgttttaaattgattttaggttttcgagttgtattgatcgtgattgggaacgaggttttttattttttagtggcgtttatatggatttattttttgattatttttttaattattttttcggttatagtattaatacgtaatattgaggtgtttttagagtgtttacgtttagggttttaggatatatgatatttaatggaggttttgttgttagatattagttattattttggatattaaatgattttaattataatgttaggagtggtcggtttttggttttgggatattatgtagttattgagagatttatgagtggtttttgagattagtataaaaaagaaatagaaagttataaaaatgttaatgatgttattatgtaaatatatgtttttgtgttttgaaagatttttagtattgtagtgtttgagtataggagagttttttttatagttagtattgaaaataaatattggatataaataaatattgaaaagaaagattgttattttttgttggtgatagtggtgttttttgtaggttaataatggttatttatgttttagattagttttagaaaaaagtaagagtatttagggagggaggagagaggaataggggaaaggagaaggaaaggaaaggggatttgtaattgtttattattgatataggaagaataagaaggttagttgtttttttataggttttgattgtttagagatttataattaaagttagtttaagaagtttagtaaaggtagtttttttaattattttttttttagtatttttttttaaatttattttggtgagttttgtttttgggtttggtgagtatgggtgggaaagtatattgtgttacgtcgattttttttttttgtttttggtaaaaattttattcgggtttttagtttttttggtttttttttttatttttttttgttggatatatacgttttagtcgtgatttattggtttttttaggtgaagaagggtaaagattgatttggttttttcgttgaatgtgtttttagttttatttttttagcggtttgttgggtattgtaggtttgtttaaatatgagttattatttttaaatatggtgttttttttaattttttcgtgtttgtgtttagtattattgtttttttagttatttagattaaaattttattgtttttttcgagggttgatttttttttgttttttatatttaattaagaggtaatttttaagttttttagttttataatttttttttttttattgtatttcggttattttttttgagatttattattttatttgttttaacggttttttaaggattattttgtttttttttttcggattttattttaaattttgtaatttgtttatttttttggatttttttttattgttttaggatttattttgatatgatttagttttgtttttaatttaaattatagttttttttatgagtttagggttttttttttgtttataacgattttttttagtttatttttttcgattgtaatttatgttttagttaagtaaaattttaatattttaagaatttaaggtttttttttttttttattttaaatttttatttttttggtttgttaggggaaagtatgttttttgtaataggtttagtttaaatgttattatatttattatttttttttttagtttttatttaaagaaaatttttttttttttgaattttagtagtagttattatgtatttattaaattttttttgaattagagttatttatttgttttttatttttttatgttgtttataagttttttgaggataaggtttggttagaattatttgggaattatgagaatttagtattgtttttggttatgttaagttaataaatgttggttaatttattgatatagatatttaaaaggataatgtaatattataggtgtttggattattatttttaaaagttaattttttatgtgatattttattatttttttttttttttgagatagagttttatttttgttatttaggttggagtatattggtgtgatttcggtttattgtaatttttgttttttgggtttaagcgatttttttgttttagtttttttaagtagttgggattataggtgttcgttattatatttagttaatttttttgtatgtttagttgagataggattttattatgttggttaggttggttttgaatttttgattataggtgatttattcgttttaattttttaaagtgttgggattataggtatgagttattacgttcggttttttaaaattgtttttgttagaagattatttttgtatttttatgttaattgaggttataaagttaaaatttaaattcgtataattttgaggtttaagtttgtaatttttggtagtatgatttataagagagttttgaatttttagttcgtaagtag

SEQ ID NO: 252 - DNA, 5527 bp, Artificial Sequence
  chemically treated genomic DNA (Homo sapiens)
ggttttttgttgttgttaaattaataattttagtttttgggtttagttatttgttgttgttaaaaatgttgttgagagtgatggagaggtgttttagtttttattttatagattagaaaattaaggtttagagaaattaagtagttttggagataggagttatggtttttttatttgagttattattttgaaatattaaggataagttaattttattaatagttttaggtttgtgagaaatgggtttggtttattttgaagattgtaaataaataaaaaaatagattgttttattattgatgagaaatatgagttattttgttaggaattgaaagtatagttgtttataaaaaagttatgtcggggtttagtttttttaggtttttgtgtgtgaaaaattatttagttaaagttttttttttatttttttttgtgtttagtaggatgttgaaatttttggaaaagataatggaaattaggggtaggaagagaatagtgtggggtgttaaatagattttagtaatttttttgtttacggttatttttgcgtagatatttcgattttttatgcgtaggtggagtagcgttttttagttttttttagaggtttttttttgtttgttttttagttatatcgtttgagattgataacgttttatagtaagacggaaatttttttttatagtattattttgcgattttgtagttataaagttgagatttttgaacgtggtatttttttgtttttttattgttttacgtgtatttgtgttattttttttgttttatcgtaaatatatttttaaaatttttattttttttatttagaaatagaattataagcggatggttaaataatttaaataaatggtttatggggaaaagtgaattttatattgttttttaaatttttagtgttttttatggagataattattgtttttaatgttttgaatatttttttagagatattttatttttatataagtatatgtgtatttgtgttttttttttattttttttttataaatattagtagattgttttgtattttggttagtttatttaatatattttggagttaggtgcggtggtttatgtttgtaattttagtattttgggaggtcgaggtgggcggattatttgaggtcgggagttcgagattagtttgattaacgtggagaaatttcgtttttattaaaaatataaaattagttaggcgtggtggtatatgtttgtaattttagttattagggaggttgaggtaggagaatcgtttgaatttgggaggcggaggttgcggtgagtcgagatcgtgttattgtattttagtttgggtaatagaatatatagatttgtttgattttttttatgattgttatagttttattgaatgtatggattattagtgttttagttagtattttagtgatgggtatttagggattataaattttataagggtagaaataatattttatttattttttgtttttgatatggtttggatgtgtgtttttgtttaaattatacgttaaggtaattttttatgttagaggtggggtttggtggaggtgattggattatggggatggattttttatgaatgggttagtattatttttttggtgttgtttttgtgatagagtttttatgagatttggttgtttaaatgtgtgtggtatttttttatttttttggttaagtttttgttatgtaagatgtttgtttttgttttgttttttgttatgaataaaagttttttgaggtttttttagaagtagatgttattatgttttttgtatagtttgtggaattgtgagttaattaagttttttttttttatgaattatttagttttaggtatttttttgtaatagtgtgaggatgagttaatatagttttttatattgtaatttaaggtaatgttttgtataaagggatgaattagattgtttagtaattaaaatataaatataaattataagtatatttatttatgaattgggggatagtttttatttgattttgagttttgatatttgttgttttgttttgttaaaaatgtgttagtttttatttagttttttattagttatattattaattaatatgtataatatgtataatttgttaggttaggaggaaatttatggatataagaaatgttttttttttttaggaaatgataatttgttttgggagagaaggtaggtattttttggtaaaagtgatataataaaataattaaaaaaagatggattttttttttttttttgagatggagttacgttttgttatttaggttggagtgtagtggcgcgatttcggtttattgtaatattcgttttttaggtttaagcgatttttttgttttaggttttcgagtagttgggattataggtatttattattacgttcggttaatattttgtatttttagtagagacggggttttattgtgttagttaggatggtttcgattttttgattttgtgattcgtttgtttcggttttttaaagtgttgggattataaatatgagttattgtattaggcgaaaagatggattttttaaaaaaggtgttaggataattaggtttttatttgtaagaaagtaaagttagaagtttattttagattatgtatattagtataaaaatgttaaatggtttaaagataaaatgttaaaataagtttagaaaggtattaaaagaaaatatagaaaatatagtattagtaaaaatttttttatataagatgtaaaagttagaagttataaaggaaaaggttgataaattagaatagataaaaatgtaaaatttttgtataatataagatataaagaatgaatttaaagatatataatgaaggttaggaagatgaagatgttttggcgatgagtggtggttatatattagtattaatgtatttaatgttattgaattgtatatttaaaatgatgaaaatggtaatttttatgttatgtgtattttattatataaaaaaagatatgaaatgaatcggggaaaatatttgttatataattaagaatgaaggtttttaataaaatttgtaaaattatatatatttttaggaatgaattaataaataatttttatgaattagaaaaaagtgataatttaattaaaaaatgaataagggatataagtaatgtgttttatagaaaaaataaaaattgataatgaagttatgaaaaaatgtttagtttttttagtaattgtataaaataaattaaaataatgagatattatttttaagattagtaaatgttaaagaaaaataataattggtgagggtgtggggaagtgggtatttatatttatgtttggaaatataaattggtgtaattttatagggagagtaattttataatattttttaaagatttatatgtataattttatggtagagaaatttattttttttttaggatttttttttttttaaaaatagtgatgtggatgaaaaatatatgtttattattgtatagggtataatagttgaaaattggaaacgataatatttatattttttttagtaggggaatggttaaataaattttataagttatttggtagatattaggtatgagttaaaagttagggtttagttagagatggaaagtatattagtaatttgaaagggaaaatgtaatatgaagaattattaattagtaaaagaaggttaattgttaaaggtataagagtatttaagttgtttgtagttagtaggtttcggttggtgagtaggaagttgttcgttgggaggttgttaaagttttttgaaggtgagtattattggttttataagttgttggtagttatggcgttaagagtaggaagagaagtattagaattcggaagagaaatttagttttttgttaggttttgtatcgtttttttggcgttttttattgataaagttagtaaaattgtgtcgttagtaaaggagatttttttatgggatgtagtttggtgttattaaagagaatagagtggatttggagtttagatgtaatataatgattgatattggtatagtatatttattttgtttttgtaaataaaatggtatatgtgatgtttttttttgtttttttgtatataaaataatatttgtttttatttattatgtatttatgtttttattttgtatgttaggagttaagtattttgtatgtattaatttattttgtttttataataatttttatatgtaggaattattatagttattttatgaatgagtcgaggaaggtattgagacgttaagtaatttgtttaaggttacgtagttagtaagtggtagagtaagaattattatggttttataagtttaggaaaaagtttgaaagaattaaaatgttaatagcggggattttaaggaagtattgaagaggttatgggagaagtttttattttgttaaaaaattagttttttaaataaataaatatagtgaggtttttttagaagtagatgttattatgttttttgtatagtttgtggaattgtgagttagttaaattttttttttttataaattatttagttttaggtatttttttataatagtgttaggatgagttgatatagttttttatattgtaatttaaggtaatgttttgtataaagggatgagttagattgtttagtaattaaaacgtaaatataaattataagtatatttatttatgaattggggggttgttttgtgtgtatagataaggtatattttttaaaaaaattatttttttaagaagaaaataaattagttaataaacgataatttatagtgttaggaagtgagaaataagtgtgtgataaacggtggagaatgggagtatttttcgtagtgggcgggaggagacgaggagggcgttttttggggagtggtagtggttggagtaaaggtttggaggaggtaagttatgtgttttgagtttttggtttttgttttattttgtgtttgagttggtttgaaggttggttgtttagattgagttttttgtttgtttgtatttcgttaatagttttagaagaaggtgattggtggttgtttgaggaatattagtgggtaagagaattagtatttttggagtatttgttgtttgtgagattaagtattatgtatattgttttatttattttttatagtaattttattaagtagtttttttttacgtgaaaagatggaggttgggtggagtaaaaggaggtatttagagtttttagtaagtgagaggtagagttgggatttgaatttagatttgtttgatattgaagtttaggttggttttattttttcggattgttttttagggagtagaagatagatattttattttagttggttgtttttagaagtttgattttgttggtttaaaacgattttagttttttgtttagaggttgcgggttgcgggttaagatattagtagaaggagggtttagttagagaggttgatatgggtttttatttatcgttatttttttttttttttagg

SEQ ID NO: 253 - DNA, 5527 bp, Artificial Sequence
  chemically treated genomic DNA (Homo sapiens)
tttggaaggaaggagagatgacggtgagtagaagtttatgttagtttttttggttgggttttttttttattgatgttttgattcgtagttcgtagtttttgggtaaggaattaaagtcgttttgagttagtagggttagatttttagaagtagttagttaaggtaaaatatttgttttttattttttggaaagtagttcggagaggtggaattagtttagattttagtattaggtagatttggatttaaattttagttttgttttttatttgttgaggattttaaatatttttttttgttttatttagtttttatttttttacgtggaaaagaattgtttggtaaggttgttgtggggagtgaataaagtaatatatatagtgtttaattttatagatagtagatgttttagaaatgttaatttttttgtttattggtattttttaggtagttattagttatttttttttgaagttgttggcggggtataggtaggtaggaagtttagtttgaataattagtttttagattagtttagatataaggtgaaatagaaattaaaaatttagagtatatgatttattttttttaaatttttgttttaattattgttattttttagggaacgtttttttcgttttttttcgtttattgcggagagtgtttttattttttatcgtttattatatatttgttttttattttttggtattgtgagttgtcgtttattaattggtttattttttttttggaaaaataatttttttaaaaaatatattttatttatgtatataaagtagttttttaatttatgaatggatatgtttgtggtttgtatttgcgttttaattattaagtaatttggtttatttttttgtgtaaagtattgttttaggttatagtgtaggaaattgtattagtttattttagtattgttataaagaaatatttaagattggataatttataaagaaaagaggtttaattggtttatagttttataggttgtataggaagtatagtgatatttgtttttggggaagttttattgtatttatttatttgaaggattgattttttaataaagtgaaaattttttttatggtttttttaatgtttttttgaggttttcgttgttaatattttgatttttttagatttttttttaggtttataaagttatagtaatttttgttttgttatttattagttgcgtgattttgggtaagttatttaacgttttagtgtttttttcggtttatttataaagtagttataatgatttttgtatgtgaaggttattatgagaataaaatgagttaatatatgtaaaatatttagtttttggtatgtagagtaaagatataaatatataataagtagaaataaatattgttttatatatagagagataaagagagatattatatatattattttgtttataaaagtagggtaagtatattgtgttagtattaattattgtgttgtatttgagttttaagtttattttgttttttttggtgatattaagttatattttataaaaagattttttttgttagcggtataattttattggttttgttagtagagggcgttagagggacggtgtaaggtttagtagaggattggatttttttttcgggttttggtgtttttttttttgtttttaacgttatgattgttagtagtttgtagaattagtggtgtttatttttagggaattttggtagttttttagcgggtagttttttgtttattagtcggggtttgttgattgtagatagtttgagtgtttttgtatttttagtagttagtttttttttattagttaataattttttatattatatttttttttttaaattattggtgtgttttttatttttaattggattttaatttttagtttatgtttggtatttattagatggtttgtaaaatttatttaattatttttttattgaagggaatgtgagtattatcgtttttagtttttagttgttatattttgtgtagtagtgaatatgtgttttttatttatattattgtttttgaaggaaaaaaaattttggaagaggaataaatttttttgttatagggttgtgtatgtaagtttttggaaaatgttgtgagattgttttttttataaggttgtattaatttatatttttaaatataggtgtaagtgtttatttttttatatttttattaattattatttttttttaatatttattaattttaggggtaatgttttattgttttagtttgttttgtgtaattattaaggagattgaatatttttttataattttattgttaatttttattttttttgtgaaatatattgtttatattttttatttattttttagttggattgttatttttttttaatttatagaaattatttgttgatttatttttaaaagtgtgtatagttttatagattttattaagggtttttatttttagttatgtagtaaatatttttttcgatttattttatgtttttttttatgtgatgaaatatatataatataaaaattattatttttattattttaagtgtatagtttagtaatattaagtatattaatattgatgtgtaattattatttatcgttaaaatatttttatttttttaatttttattgtatgtttttaaatttattttttgtgttttatattatataaaagttttatatttttatttattttaatttattaatttttttttttatgatttttggtttttatattttgtgtagggaaatttttgttggtgttgtattttttatatttttttttaatatttttttagatttgttttaatattttatttttaagttatttgatatttttgtgttggtatgtatggtttgaggtgggtttttaattttatttttttgtaggtggggatttgattattttaatattttttttaaaaaatttattttttcgtttggtgtagtggtttatgtttgtaattttagtattttgggaggtcgaagtaggcggattataaggttaggagatcgagattattttggttaatatagtgaaatttcgtttttattaaaaatataaaatattagtcgggcgtggtggtgggtgtttgtagttttagttattcgggagtttgagataggagaatcgtttgaatttgggaggcggatgttgtagtgagtcgagatcgcgttattgtattttagtttgggtgatagagcgtgattttattttaaaaaagaaaaaaagatttatttttttttgattattttattatgttatttttgttaaaaagtatttgtttttttttttaaagtagattattattttttagaagggagggatattttttgtatttataagtttttttttgatttggtagattgtatatgttatatatgttggttggtgatatgattgataggaagttgaatgagaattagtatatttttaataaagtaaagtagtaggtattagaatttagaattaaataaaagttgttttttaatttatgaatggatatgtttgtggtttgtatttgtgttttaattattaagtaatttggtttatttttttgtgtaaagtattgttttaggttatagtgtaggaaattgtattagtttatttttatattgttataaagaaatatttaagattggataatttataaggaaaagaggtttaattggtttatagttttataggttgtataggaagtatagtggtatttgtttttggggaagttttagagagtttttatttatggtagaaggtaaagtaagggtaagtattttatatggtaggaatttgattaagagagtggggaggtgttatatatatttaaataattagattttatgagagttttattataagaatagtattaaagggatggtgttaatttatttatgaaggatttatttttatgatttaattatttttattaggttttatttttgatatgggggattattttgacgtgtgatttgggtagggatatatatttaaattatattagaaatagaggatgggtaagatattgtttttgtttttatgaagtttgtgatttttaaatgtttattattaaggtgttagttggagtattgatgatttatatatttaatggagttgtagtagttatgaaaaggattaagtagatttatatgttttgttgtttaggttggagtgtaatggtacgatttcggtttatcgtaattttcgttttttaggtttaagcgatttttttgttttagtttttttagtagttgagattataggtatgtgttattacgtttggttaattttgtatttttagtagagacggggtttttttacgttggttaggttggtttcgaattttcgattttaggtgattcgtttatttcggttttttaaagtgttgggattataggtatgagttatcgtatttggttttaagatatgttaaatgagttaattaaggtgtaaaatagtttgttagtgtttgtggggggaaaatgagggaaggatataaatatatatatgtttatataagaataaaatatttttgaaagaatatttaaaatattagaaataataattatttttataaaaggtattgaaagtttgggggatagtgtgaaatttatttttttttatggattatttgtttaaattgtttaattattcgtttgtagttttatttttaaataaagaaaatgggaattttagaagtatgtttacgatgaaataagaaagatgatataggtatacgtgaaatagtaagggaatagaagagtgttacgtttagaagttttaattttgtggttgtagaatcgtaaggtggtgttgtaaagggaggttttcgttttgttgtagggcgttgttaattttaggcgatgtggttggaaggtaggtagaaggaagtttttggaaagaattaggaaacgttgttttatttgcgtatggggggtcgaggtgtttgcgtagagatggtcgtgggtagggaggttgttgagatttgtttagtattttatattgttttttttttgtttttgatttttattgttttttttagaaattttagtattttattgagtataaagagaaataaaaggggaattttgattgagtggttttttatatataaggatttggagaggttggatttcggtatagtttttttatgggtagttgtatttttaatttttggtagaatgatttatattttttattagtaatggagtagtttatttttttatttgtttataatttttaagataaattaagtttattttttataggtttaaaattgttgataaagttggtttgtttttgatgttttaagatgataatttaagtggagaggttatggtttttatttttaagattatttagtttttttgggttttgattttttgatttgtaaaatgggaattaaaatatttttttattatttttagtaatatttttagtagtagtaggtggttaaatttaagggttggagttgttaatttggtagtagtaagaagtt

SEQ ID NO: 254 - DNA, 10224 bp, Artificial Sequence
  chemically treated genomic DNA (Homo sapiens)
agtttttatagttttagtatcgttttttttattttatttcgattgcgtttttgttgtttatttttgtttatttattttaattttagtgttttttttagtttttgggttttaggtgatatattagttagtgggatatgggtttttataggtatttttagtttaatttagttttttttttttttttggttttttggttagtatttgtattatattggtttttattggatatttttgtagtttcgggttttttttatagatatattgttggattagttgtttaatttggtttatttgtagagttttttggtttatttgattttaattgaaatttagttttttaagaaggatttggtgttggaataggtaggtattggaaagttagttgtttaggattattgttttattttattagtatttttttgttattttttattttttttttttagattttagaaatttgggagcggttggagcgagaaaatagaggtaagtggtaggtaattgttaagtattagttttagtatgtgtttagttttttagagtaggatttgcggttgtaggcgcgaaggtaaggtttgtggaaatggtagggagggtggaggggatgtaggaggtatggatgtgggtggggtgtttttattttttagggttagttagatttttttgatttttttttaggtgggttgagatttataggttggatgtgttagaggtagtggttttagagcggtttcgttgtgtttattgtagtgtagaggtttttaagcgttgtttacgatgttagaatgagtggtattgttgtaggtgagggtattttagaattttggatttttaagttttatttttatattttttatatgtattgttatttttaatatttatttgtttgtagggagtgttaagttaagtattgggaaaagtatggaaagatttgtgttttggtagtttagggtgatagagttaaatgagggttgtagttgttgagggtcgattatttatgttaagggaatttatttagaatgtatttttgaattttaagattacggtttagtttttgtcggagttttagttttcgtagtggagagtagagcgggcggtaaagttgttgatcgattttttttttttttattttaagtgaaggttcgagattttttgttttatttagtgggtaggttaagtgtgttgttttagtaaatcggattaggagggttagggtcggatgtggggattttttttttttagtatagtaaagttggtttttagaaatacgggtattttcgcgtggtgttttgcggtcgtcgtcgttgtggtcgttcggggtggggtgtgaggaggggacgaaggagggaaggaagggtaaggcggggggggttttgcgagagcgcgtttagtttcgttttcgggttttatagtttttgtatttaggtttttattgcgcggttttttttagttttttttcgtcgtttagtttggattttgggggaggcgttgaagtcggggttcgttttgtggtttcgttcggttcgcgtttgttagcgtttaaagttagcgaagtacgggtttaatcgggttatgtcgggggagtttgagtttattgagttgcgggagttggtattcgttgggcgcgttgggaagggtcgtattcggttggagcgtgttaacgcgttgcgtatcgcgcggggtatcgcgtgtaattttatacggtagttggtttttggtcgtggttatcgtttttagttcgcggggttcgttacgtatacgtggtgcgatttttgtggcgattttatttggggcgtcgtgcgtaaaggtttgtagtgcgcgcgtgagtagtggtttcgcgcgtttacgagagcggaaggggtagttaaggggtagcgtagtcgtcgcgggttaagtcgcggtagagggggtcggcggggatagttttcgaggattaggttcgttattttcgttttatcgttgaagagtgcgcgaaaatggtttattttttgtcgtattttattcgtatttgggttatagatgagtagaggtggttgtttatatgtaaaaatacgttgattttaagttttttatttttaaaatgttttggttttttttgagaaagggtttgtgtttattgttttcggagtttatttttttaggtttgtttttttttaaatatttatgattttttttagaatttttagggtgaagggaaattattatttatgggagggagtttggaaaaatttagaatttttggtgggttttttgtaagtaggagttttgttgagtttttatttagtaaatatttttttttgatttagtgaattagatgttaaaatatgtacgtagttatatatttagtagtttttttgtatttttgggaatcgttagtaagtaaaggttgtttttttttgggtagatattagttggaattattaggggtgtttttatagtttttttcgttagtttggattttatcgtagatttgttgaattaattgttgggagtggattttaggtattagtaaattttaaaaattttttaaattattgtaatatggagtttgggttgagtattattgttttggtttatttaggaatttgtggatggatagtgttttaggtttgtgtgtgtatggagatttttttattcggtataagaggatattataaatttagttggggggagtataaagttgtgatagaatgtaaagaatgaataaggggtcgagcgcggtggtttatgtttgtaattttagtatttcggaaggcggaggcgggtggattatttgaggttaggagtttaagattagtttggttaatatggtgaaattttatgtttattaaaaaataaaaaaaaatgagttaggcgtagtggcgggtgtttgtaattttagttattcgggaggttgaggtgggagaattgtttgaatataggaggcggaggttgtagtgagtcgagatcgtgttattgttttttagttttggcgatagagtgagattttgttttaaaaaaaaaaaaaaaaaaaaaaagaataaggttgggatattgtagcgtttttaaagagaaataaagtagttatggagataagaagtaggatgatttgggtatgtttattagaggtagagataagggagaaattaaagataagtttgggtttttgtttttagtaattgggagtttagtggttatttttgttgtaaagaggaagttgggtaagtgtagtagtgaggttgaagaaaagggaattaaattttggttatgtttatttgaaacgttttttagatattttagtgaaggtattggtacggaggatttagtttgagggtttaggttagtgttttagtcgtggatttggggtagatgaatgtagatagattaggttagtgattaggattgagtttagattttatcgtgagatatggaagttgagttagaatttgtaaaggagttgagtaggagttgtagggggtaggaggaaaattgggagagtgtagtttttgggagttaaagggagtaagttttaaatgatgttgagggggtgagaatggagaatggaatattggattttatttggtagtatatagatcgttgaggattttgtttcgggtagttttttggaggaagaggtaagtttggttggagtgggtagaggggagagtgaaggcgaaggattagagtgtatagagattagtgttttggtttgaggggagtagagataggtgataattatagggtagacgtaggttaaaggtgtttagttttttttttaagtaaatgggtagatgtattttatatacgtttttagtgaagggtcgggtgcggtggtttaagtttgtagttttagtattttggaaggtcgaggcgggtggattatttgagattaggagtttgagattagtttggttaatatggtgaaatttcgtttttattaaaaatataaaaattagttgggtatggtggcgggcgtttgtaattttaggtatttaggaggttgaggtagaagaatcgtttgaatttaggaggcggaggttgcggtgagtcgaaatcgcgttattgtattttagtttgggtgataaaagtaagacgtagttttttgttgttgtttttttaattgttaatgaggaaaggggaagttttgtgttaggcgatagagatttaattgttgagtaggtttttttgtttgtggtttttcggtcggtttttagacgtttaggtggttaatattagagttcgcgtagtagtgtgaggtaatttattgagataggtcgggtttgcggagtttggcgagtagcggttttttttttggggtttttttttaattttcgggatattttttcgatttggagttttttcgttttatcgttaggtttttttgtagattgtaagtttatttgttattatcgttgtcgcgcgttcgtttgtttggattgttgcgggtttcgggatttgggttgggaattcgcggtggagcgggatacgaacgtggtgagcgcggggtcgagggcgtatgggaagggcgaggatgggtaggttatagtgtaggtattttcgagggttgtttgggtgtcgcgcgtaaggagcgttttaattgtcgatttttcggcggtatagagaggttaattttgcgcgggggttgggaggggagtttggattgtcggtttcgtaagtattttattcgttgtaagcggattcgggtttaggttgatttaggtttcgcgtacgcgtatttttcgtattttttcgttttcgttttcggttagaggttatttttgtgcgtttgttcggacgttggtattcgttttcgttttttgtggtaggtggggtttgtgagtggagtttcggagcgatgaggttatttttgggggcgaagcgtgcgtgttttcgtttcggcgtttttgttttaatgagataagagttagatttcggcgatttacgttttagttttaacggttgcggcgcggttttggttcgggcgtacgcgtatattgatacgcgtatacgtacgtacgcgatcggggcggtggttggcggttacggacgcgtaggattgggggacgggcgggtacggttatgggcgaggcggaggcgttttttttcgaaatgatttggagtagtacgacgagtagtggttattgtagttaagaggattcggattcggagttcgagtagtattttatcgcgcgaatttcgttagttcgtaggtcgcgtcgggattaggtgggagttagggggtgtcggcgggcgggaggggaagcggtcgttggagtttcgtttttttcggttcgttgtcgcgttttgggtcggtgggtagttttatttttttggttacgtggtttttcgcgggttttggtcggggatttgttcgcggaatcgtgcgtaagatttcgattttatcgtttagatgttgggtgtcggggtttttttggtttttgttatagataggttgaatacggaaaaagtagttgtatggtttgtggtagatttgagtcgggtattatttagttatgattaaagtcgatcgagtagtttggattagtatttcgattttcgcgttcgaatgtttttgttttttttttggggagattaggggaggatgtggagagggaagagttttcgttaggaattgagaagtatgtttaggaaaatttgagaggtagagagagattttgtttttttatttgtatttttgtatggagttagttgagtttttattttttttttgttttggtttgttattagttgttggaatgtggaagattttgttttttttttttagggtggatttggagaaagatttgggaatagataggaaagaagttttgttttggattataagtatttaggagtattttatttataggaagggggaaagttagattataaaatgtttaaagaggtggaaaaagagatttaggttattaatttaggattgtaaggtgtttcggaattttttaggtatttttattatcggagaattgtgtgttagatgttattggtgtgattattaggtttagagaattaggtttaggtattaggaaaaagaaatagggattgtgaagtttagtatgtttggtagaaatggggcggaaatttttatttaagtaaagaaagtggagttgtgagtgatgttttagataaaattttataaaattttttataaaatgggtggtgtttagtacgttaaaattttagtttagagtttgggtgtaagggttgagttgagtgtagatttttgggtttgtttttatgttagttagttttgagttattttttattgtggaaaggtgggaaaattataagatattaattaattgaaaaggagggttagttacggaggtgtatatttgtaattttagttatttgggagggtgaggtagaaggattatttgaatttgggaggtagaggttgtagtgagttaagatcgtgttattgtattttagtttgagtgatagagtgagattttgttttaaaaatagaaaaggaagttaagtacggtggtttatatttttaatgttaatgttttgggaggttaaggtaggtggattatttgtaattaggaattcgaggttagtttggttaatatggtgaaattttatttttattaaatatataaaaattagtcgggtatggtggtgtgtgattgtagttttagttatttgggagattgaattattttaatcgggaggtaaaggttgtagtgagttaagatcgtgttattgtattttaatttgggtgatagggtgaggttttgttttaaaaaaaagaaagaaggttgggtttggtgatttatgtttgtaattttagtattttgggaggttaaggtaggtagattatttgaggttaagagttcgagatttgttaggttaatatagtaaaatttcgtttgtattgaaaatataaaaaaattatttggttatggtggtgtgtgtttgtaattttagttattggggaggttgaggtaggagtattatttgaatttagaagatagaggttgtagtgagtcgagattgggttattgtattttagtttggatgagagagtaagattttgttttaaaaaaaaaaaaaaaaaaaaagaaagaataggaggttgagaagttttaagttatatgttaaaaaaaaagaaaaaaatattagttttaggttaggtgtagtggtttatatttttaattttagtattttggaaagtcgaggtgggtggattatgaggttaggagtttaagattagtttggttaaaatggtgaaatttcgtttcgattaaaaatataaaaaattagttagttgtggtggtaggtatttgtaattttagttatttgggaggttgaagtagagaattgtttgaatttaggaggtagagattgtaatgagttaagatcgtattattgtattttagtttggaaaatagagcgagattttgttttaaaaaaaaaattattagtttttatggatagtggtagagtggagggtgggtttttatggtgtagaagggaaattttatggttttgttgtgtattcgattgggatggttgttgaaatttttttttagtaggtagttttggaaatagaaaaagaaatttttttttttttagaattttggaagggttgtgtagtgtttttaatttaagtttgttttttgagtgaagatagggaggtttattattagaagggaaggggttggaaatgaggttattgtattttagtttagggtttttgggttatttaggaagggaagaaggagtaagtttttttattgttaggtaggagtttagagttattataagaataagttagtattatttttgtgttttttttgttttgtaaataaaatgatttttttttttgttttggtattagagtttgtttggtattttttttgtttttagtattttttttatttgggtattttttttcgttggtgtattgaataaatatatttattgttttatttatagtttttagtttttattttttagggtttatattatttgtttttattaattcgataaggttgtttattgtttttagtaaggtttgtattggggtttttattttagtgtttttttttatttaggagatttttggatatttggggaagaaaatgagtttaaatttttatttttttttttttattttttttttgtaaggttttggttttagtttttagttttatatttttgttggttgtagaatagtagcgggttttgggtaaggagtattttgttaaaacgttttattttgtttttttatttgttttttttatttgtttttattagatggtttaagtgtttaaggggattttagggcggagttagggagaattttggtttttttgggttaggtataagattattttataggaaattttgtgggaatttttttgggataaagtattggttagcgttgagtttagttgtgtttgtgatattcgtattttaattagggtttatttgacgttaataggaagtaaggttgatgtagtggggttaagggagtttgggagaagaaagtcggtttagagttttggttgttttgttttatattttattttttcggtaagaatttagtttttagatgaggtggggagtgagtggtcgagttaaaaatttttgggtcgggtacgatggtttacgtttgtaattttagtattttgggaggtgaaggtaggcggattatttgaggttaggagtttaagattaatttggttaatgtggtgaaattttatttttattaaaaatataaaaattagtcgggtgttgttgtggtacgcgtttgtagttttagttattcgggagtttgaggtaggagaatcgtttgaatttaggaggtagaatttgtagtgagttaagatttagttattgtattatagtttgggcgatagagtgaggtttcgttttaaaaaaaaaaaaaatttttgggttaaatttttagatagtataggtaggtgtagaaatttattaggaagttgtttgtgtatttttggtagattggagtttggtttaaagttgttttttatgtagtttgggttaaggttaaatattatgttatagtgattttttttattatgtgtgagatatggagaattggttttaagtattattttgtttattggtggttggattattgatgtgtattattttttattttttttattttgtagtgggttatggtttcgtgtcggggtagaggagaaaaatgggttgttttttttaggataaatttttattttaatttaattagggtgttgtgattagaatgtgtaattgaggtgtgattttattgattttttttttttttgagatcgagtttcgtttttgttgtttaggttggagtgcgatggtacgattttagtttattgtaatttttatttttcgagtttgagtaatttttttgttttagttttttaagtagttgggattataggtatgtgttattacgtttggttaattttgtatttttagtagagacggggtttttttatgttggttaggttggttttaaatttttgattttaggtgatttattcgtttcggttttttaaagtgttagaattataggcgtgagttaacgtgtttagtttgtttttgttttttgtgttttgaagtagggttttatttagttttttaggttggagtgtagtgatacgataatagtttattgtagttgtaatttttcgggtttaaacgatttttttattttagttttttgaatagttgggattataggtatattattatatttggttaatttttttttttttttttttagtagagatgaggttttgttatgttgtttaagttggttttaaatttttgaggattaagtgatttttttattttagttttttaaaatgttgggattgtagatgtgagttattatatttagtttgattttattttaaatgagagtttttttttagagttttttagttgtttttggtttttggttatgtgtttttagttgtttttgtttttgtggtatttttaaggttatatttagtgttgaggttttaggtaggtagtagagagaagttaaatgattttgttttttttttatttatttagagtatgtaaaattaggagtagtggtgggtttagggtgggtattagttatgtatatgtatattagggatagggggttaaaggtagttagtttttaaagattgttttagaggttattttttagagaagttttgggttttttaagggttttgtgtttatgttggtttattttgtagg

SEQ ID NO: 255 - DNA, 10224 bp, Artificial Sequence
  chemically treated genomic DNA (Homo sapiens)
tttgtaagatgggttagtatggatatagggtttttgaggaatttagggtttttttgaaaaatggtttttggggtagtttttggaaattgattgtttttggttttttgtttttgatgtatatatatatagttggtgtttattttgaatttattattgtttttggttttgtatgttttgggtggataagggaaagatagaattatttggtttttttttgttgtttgtttagggttttagtattgaatgtagttttaaggatattatagaagtaggggtaattgaaggtatatggttaggggttaggaatagttgagggattttgaagagggatttttatttaaagtaaaattaggttgggtgtggtggtttatatttgtaattttagtattttgggaggttaaggtaggaggattatttgatttttaggagtttgagattagtttgggtaatatagtaagattttatttttattaaaaaaagaaaaaaaaaaattagttaggtgtggtggtgtgtttgtagttttaattgtttaggaggttgaggtgggaggatcgtttgagttcgggagattgtagttatagtaagttattatcgtgttattgtattttagtttggggaattgagtgagattttgttttaaaatataaaaaataaaaataggttgggtacgttggtttacgtttgtaattttagtattttgggaggtcgaggcgggtggattatttgaggttaggagtttgagattagtttgattaatatggagaaatttcgtttttattaaaaatataaaattagttaggcgtggtggtatatgtttgtaattttagttatttaggaggttgaggtaggagaattgtttaaattcgggaggtggaggttgtagtgaattgagatcgtgttatcgtattttagtttgggtaataagagcgaaattcggttttaaaaaaaaaaaaaattagtaaaattatattttaattgtatattttgattatagtattttagttgagttggagtgagggtttgttttggagaaggtagtttattttttttttttgtttcggtacggggttatgatttattgtagggtgagaggagtggagagtggtgtatattagtagtttagttattagtggatagagtagtatttggagttagttttttatgttttatatatagtgagaaaaattattgtgatatgatgtttaattttgatttaagttgtataaaaggtagttttaggttaggttttaatttgttagaggtatataggtagttttttggtgggtttttgtatttgtttgtgttgtttggagatttggtttaaagattttttttttttttgagacgaagttttattttgtcgtttaggttgtagtgtagtggttggattttggtttattgtaagttttgttttttgggtttaagcgatttttttgttttagattttcgagtagttgggattataggcgcgtgttataataatattcggttaatttttgtatttttagtagagatgggattttattatattggttaggttggttttgaatttttgattttaagtgattcgtttgtttttattttttaaagtgttgggattataggcgtgaattatcgtattcgatttagagatttttaattcgattatttattttttattttatttagggattggatttttgtcggaagggtggagtgtgggatagggtagttagggttttgaatcgattttttttttttagatttttttggttttattgtattagttttattttttgttgacgttagataggttttagttagaatgcgagtgttatagatatagttaagtttagcgttgattaatattttgttttagaagaatttttataaggttttttgtagaatgattttgtgtttagtttaggagagttagggttttttttgatttcgttttggagtttttttaagtatttaaattatttgatggggataaatggagaggatagatgagggagtagggtggagcgttttagtagaatgttttttatttagaattcgttgttattttgtagttagtaaggatgtggggttaagaattaaggttagggttttataggaaaaaggtaaagggggaggggtgggaatttaagtttatttttttttttaagtatttaaaggttttttggatggagaagagtattggagtaaaaattttagtataaattttattggggatagtgggtaattttgtcgggttagtaaaaataaatggtgtgggttttggaaaatgagggttggaggttgtgaataaagtagtggatgtgtttgtttagtatattaacgggaagaagtatttagatgggaggagtattaggggtaggagaaatgttagatagattttagtgttagggtaagaaggaagattattttgtttgtagaatagggagggtatagggatggtgttaatttgtttttgtgatggttttgagtttttatttaataatgagaaagtttgtttttttttttttttttggatgatttaggagttttgggttgggatgtagtgattttatttttagtttttttttttttggtgatgaatttttttatttttatttagaaaatagatttggattagaggtattgtatagtttttttaggattttaaaggaggaagagtttttttttttgtttttaaagttgtttgttggaagaggattttaatagttattttagtcggatgtatagtaggattatggaattttttttttgtattatagggatttattttttattttattattgtttataaaaattgatggttttttttttgagatagagtttcgttttgttttttaggttggagtgtagtggtgcgattttggtttattgtaatttttgttttttgggtttaagtaattttttgttttagttttttaagtagttgggattataggtgtttgttattataattggttaattttttgtatttttagtcgagacggggttttattattttggttaggttggttttgaatttttgattttatgatttatttatttcggttttttaaagtgttgggattaaaggtgtgagttattgtatttggtttaaaattgatgtttttttttttttttttaatatataatttgggattttttagttttttattttttttttttttttttttttttttttgagatagagttttgtttttttatttaggttggaatgtagtggtttagtttcgatttattgtaatttttgttttttgggtttaagtgatatttttgttttagtttttttagtagttgggattataggtatatattattatggttagataatttttttgtatttttagtatagacggggttttgttatgttggtttggtaggtttcgaatttttggttttaagtgatttgtttgttttggttttttaaaatgttgagattataggtatgagttattaagtttagtttttttttttttttttgagatagagttttattttgttatttaggttggagtgtagtggtacgattttggtttattgtaatttttgtttttcggttgaagtgatttagttttttaagtagttgggattatagttatatattattatgttcggttaatttttgtatgtttagtagagatagggttttattatgttggttaggttgatttcgaatttttgattgtaaatgatttatttgttttggttttttaaagtattggtattagaggtgtgagttatcgtatttggtttttttttttatttttgagatagagttttattttgttatttaggttggagtgtagtggtacgattttggtttattgtaatttttgttttttaggtttaagtgatttttttgttttatttttttaagtagttgggattataggtgtgtattttcgtggttagtttttttttttaattggttagtgttttgtggtttttttatttttttatagtggaaaatggtttaggattgattgatatgaagataagtttaggggtttatatttaatttaatttttgtatttaagttttgggttaagattttggcgtgttgagtattatttattttgtaaggaattttgtaaaattttatttgaagtattatttataattttattttttttatttaaataaggattttcgttttatttttgttaggtatattgagttttatagtttttgttttttttttttggtgtttaggtttggttttttgagtttggtggttatattaatggtatttggtatatagtttttcgataatggggatatttaggaggtttcgagatattttatagttttgggttagtaatttggatttttttttttatttttttaggtattttataatttagttttttttttttttgtgggtaaagtgtttttgaatgtttatggtttaaaataagattttttttttatttatttttaaatttttttttagatttattttagaggaagggaatagaattttttatattttagtagttggtgataggttagaatagggaagaggtgagggtttagttggttttatataggagtgtagatggaggagtaggatttttttttgttttttaagtttttttaaatatattttttaatttttggcgaggatttttttttttttatatttttttttagtttttttaaggagggagtaggagtattcgaacgcggaaatcgaggtgttagtttaaattgttcggtcggttttagttatagttggataatgttcggtttaggtttattataagttatatagttgtttttttcgtgtttaatttgtttgtgatagaaattaagggggtttcggtatttagtatttaggcggtggaatcggggttttacgtacggtttcgcgggtaggttttcggttaggattcgcggggagttacgtagttaggagggtggggttgtttatcgatttaggacgcggtaacggatcggggagggcggagttttagcgatcgttttttttttcgttcgtcggtattttttggtttttatttggtttcggcgcggtttgcgagttagcgaggttcgcgcggtgaagtattgttcgagtttcgagttcgagtttttttggttgtagtagttattgttcgtcgtgttgttttaggttatttcgaaagaaggcgttttcgtttcgtttatagtcgtattcgttcgttttttagttttgcgcgttcgtagtcgttaattatcgtttcggtcgcgtgcgtgcgtgtacgcgtgttagtgtgcgcgtgcgttcgggttagagtcgcgtcgtaatcgttaagattgaaacgtagatcgtcgggatttagtttttgttttattggggtaggaacgtcggggcggggatacgtacgtttcgtttttaggaatgattttatcgtttcggagttttatttatagattttatttattatagggaacgggggcgggtgttagcgttcgggtaagcgtataagagtggtttttggtcggaggcgagggcgggaaggtgcgggaagtgcgcgtgcgcggagtttgggttagtttgggttcgggttcgtttgtagcgggtggagtatttgcggagtcggtaatttaggttttttttttagttttcgcgtagaattagtttttttgtgtcgtcgggaaatcggtaattagaacgttttttgcgcgcggtatttaggtagttttcgagaatgtttgtattgtggtttgtttattttcgttttttttatacgttttcggtttcgcgtttattacgttcgtgtttcgttttatcgcgggtttttagtttaggtttcggggttcgtaatagtttaggtagacgagcgcgcggtagcggtagtggtaggtgaatttgtaatttgtagagaggtttggcggtgaggcggaggagttttaggtcggggaaatgtttcggagattgaagggaagttttagggagagggtcgttgttcgttaggtttcgtaggttcgatttattttagtgggttattttatattgttacgcggattttaatgttggttatttgggcgtttggaaatcggtcggaaggttataggtagagaggtttgtttaatagttggatttttatcgtttagtatagaattttttttttttttattggtaattaaaaaaataataataaaaaattgcgttttgtttttgttatttaggttggagtgtaatggcgcgatttcggtttatcgtaattttcgttttttgggtttaagcgatttttttgttttagttttttgagtatttaggattataggcgttcgttattatgtttagttaatttttgtatttttagtagagacggggttttattatgttagttaggttggttttaaatttttgattttaggtgatttattcgtttcggttttttaaagtgttgggattataggtttgagttatcgtattcggttttttattgggaacgtatatggaatatatttgtttatttatttgaaggaaaaattaaatatttttaatttacgtttgttttgtggttgttatttgtttttattttttttagattaagatattggtttttatatattttaatttttcgtttttatttttttttttatttattttagttaggtttgtttttttttttaggaaattgttcgggatagggtttttagcgatttgtgtattattaaatggaatttagtgttttattttttatttttatttttttagtattatttgaagtttgttttttttgatttttaggggttatatttttttagttttttttttattttttgtagtttttgtttagtttttttgtagattttgatttaatttttatattttacgatgaagtttgggtttagttttgattattggtttggtttgtttatatttatttgttttagatttacggttgaaatattgatttaaatttttagattagatttttcgtgttagtatttttattaggatgtttaaaagacgttttaagtgaatatggttaaaatttaatttttttttttttagttttattgttatatttgtttagttttttttttgtagtaaaaatggttattaggtttttagttattggagataaaagtttaaatttatttttgattttttttttgtttttatttttgataaatatgtttaaattattttgttttttatttttatggttattttatttttttttgagaacgttgtaatgttttagttttgttttttttttttttttttttttttttgagatagagttttattttgtcgttaaggttggagggtagtggtacgatttcggtttattgtaattttcgttttttgtgtttaagtaatttttttattttagtttttcgagtagttgggattataggtattcgttattacgtttggtttatttttttttattttttagtagatatgaggttttattatgttggttaggttggttttgaatttttgattttaggtgatttattcgttttcgtttttcgaagtgttgggattataggtatgagttatcgcgttcggttttttgtttattttttgtattttgttataattttgtgttttttttagttgaatttgtgatgtttttttgtatcggatgagagggtttttatgtatatatagatttgggatattatttatttataagtttttaaataggttagagtagtgatgtttaatttagattttatgttataataatttggggagtttttaaaatttattgatgtttagggtttatttttagtagttgatttaataggtttgcggtgggatttaggttagcggggaggattgtaaaagtatttttggtgattttagttggtgtttatttaggggagagtaatttttgtttgttggcgatttttaggggtgtagaaggattgttgggtgtgtggttgcgtgtatattttagtatttgatttattgggttagaaaagggtgtttgttaaataaagatttaataaaatttttgtttgtagggggtttattaaaggttttaaatttttttaggtttttttttataggtggtaatttttttttattttaaaggttttggagggggttatgagtgtttgagaagaggtaagtttgggaagatggatttcgaggatagtaggtataaatttttttttaagaagggttaaggtattttaaagataagaaatttaaaattagcgtatttttatatataagtagttatttttgtttatttgtggtttagatacgagtggagtgcgataagggataaattattttcgcgtattttttagcgatggggcgaaagtaacggatttagttttcgggagttgttttcgtcgattttttttgtcgcgatttgattcgcggcgattgcgttgttttttggttgtttttttcgttttcgtaggcgcgcggggttattatttacgcgcgtattgtaggtttttgcgtacgacgttttagatgaagtcgttatagaggtcgtattacgtgtgcgtggcgggtttcgcgggttggaagcggtggttacggttagggattagttgtcgtgtggggttgtacgcggtgtttcgcgcgatgcgtagcgcgttggtacgttttagtcgggtgcggttttttttagcgcgtttagcgggtgttagttttcgtagtttaatgagtttaggttttttcgatatggttcggttgggttcgtgtttcgttggttttgggcgttagtaagcgcgggtcgggcggggttatagggcgggtttcgattttagcgttttttttaggatttagattgggcggcgggaaggagttgaggagagtcgcgtaatggaaatttgggtgtagggattgtggggttcgaaggcggggttgggcgcgttttcgtagagtttttttcgttttgtttttttttttttttttcgttttttttttatattttatttcggacggttataacgacggcgatcgtaaagtattacgcggagatattcgtgtttttggaggttagttttattgtgttagaggaagagggtttttatattcggttttggtttttttggttcggtttgttgaagtaatatatttggtttatttattgggtggggtaggaagtttcgagtttttatttggggtgaggaggagggagatcggttagtagttttatcgttcgttttgttttttattgcggagattggggtttcggtagaggttggatcgtgattttgaggtttaggggtgtattttgggtggatttttttggtatgggtggtcggtttttagtaattgtagtttttatttggttttgttattttgggttgttaggatataagtttttttatgttttttttagtgtttgatttggtattttttgtaggtaggtgggtattgaggatggtaatgtatgtgggggatgtgggagtagggtttagaggtttaaggttttaggatatttttatttgtagtaatattatttattttggtatcgtgagtagcgtttagaagtttttgtattgtagtaagtatagcggggtcgttttggagttattgtttttagtatatttagtttgtaggttttagtttatttgggggaaagttaggaaggtttgattggttttggaaggtgggggtattttatttatatttatgttttttgtattttttttattttttttgttatttttataggttttattttcgcgtttgtagtcgtaggttttgttttgaggggttgaatatatgttggagttggtgtttggtaattgtttgttatttgtttttgttttttcgttttagtcgtttttagatttttgggatttaggagagagaagtggagagtggtaggaaggtgttggtaaagtgggatagtggttttgagtagttaattttttagtgtttatttgttttaatattaggttttttttaggaggttgggttttagttagggttagatgggttaggaaattttgtaagtgggttaggttgggtagttggtttagtagtgtgtttgtgaggaaggttcgaagttgtaagggtgtttagtggaggttagtgtgatgtaggtgttggttagggggttaaggaaaaggaaggggttgggttgggttgagaatgtttgtgggggtttatgttttattagttggtgtgttatttgaggtttaaggattgaaaagagtattggggttgaggtgggtgggtaaagataaatagtagggacgtagtcggggtaggatggggagggcggtattggggttgtgggggtt

SEQ ID NO: 256 - DNA, 11787 bp, Artificial Sequence
  chemically treated genomic DNA (Homo sapiens)
tgtgaaatattagttatgaagaaattttgataataatattttagtgtagaattgtatattagtaatagtatgtttggatttttttagatatgtggtattaatatatgtttggaattttaagtgttagattaagaagaaaaatttaagatataaagtggtgttttaataatttgagttttattatttttaatgttaagaaattattatatatataaattttatgtttgtaattttagatttattgttgtataggatttttggtaattataagttagttgtattaagtaaattttgatttatttggttggtggttttgtgaacgataattatttttaggcgggtttaatggaaggtcggagaaggtattgtttgataagttatattttgttagttttagaattttgagtgaatgttgttgttttgttttgtttgtttttatattgtaaattggttatgagtttatttattatttttttttgttgtgaatttttagtaatatattttattaaaagattttttttgataaagtagatttttatgagttgaaatatttattgattttaatgtttatttttagatagttttgtataggaatttttatgtttaaggatagttgattttggtaaattggattttttaaaaattagattatagaatttttgtttgtaatttttttatttaaggaatatttagataatttggtttggagagaagattattaaatttttttttatataataggttttttttattaggtttgtaagggataaatagtgaatatttatttgtaattatgtaattgttttgtagagtaagtgtagttataagtggtaagaaatgaatgagtatggttgtgttttaattataattattatggatggatatatttgtattttttatgttagatggaattttgttttgttgtttaggttggagtgtagtgacgttattttgatttattgtaattttcgttttttaggtttaagtagttttgttttagttttttaagtagttgggattataggcgtacggttaatttttgtatttttattagagacggggttttattatattggttaggttggttttaaatttttgatttcgtgatttgtttgtattaattttttaaagtgttgggattgtaggcgtgagttatcgtgtttgatttaggattatatttaaatgatttataaatgtaaaaattatttttatattatagatttgatttaaggattgtagtttgttgtgtttttgttttttgaatgggacgtggtggtatagtagttgggattatagttatatattattacgtttatttaattttgtatttttagtagagatggggtattattatgtttattaggttgattttgaatttttgattttaggtgatttattcgttttaattttttaaagtgttgggattataggcgtgagttattgtgttcggtttgtatttttatttttaaattttagtatttttgaataataacgggtagagaaatattcgtagtagttgtttataatagagtgaaataaaaagtttgaggaattgttaatagaaaaatgggtggtcgtggggagtatcgggatttgtatttgtatataatttagggtagtttttaatgagtttatgagttatttagggattttattaaaatgagattagttttgagtggggttttttttatagatttttgttattatattttgaagagtaagggtttagttgattttaagtaggtgtgtatttttttggatagtgtttgtagaaaaatagaattatatttatggattttatgattatattgttagttttttggttaaggggttgagttaggtatttattgtagatagaaataaagtagatgtatgtttattagtgagtattgagatatttagtatggttatttatgaattgaagtttggtttttttttatttattaattgattattttttattttaagtaagtattttatattttgtatattagtatatttttggatttcgtttttttatatggtttgatattttgaatattagattatttaagagtgagatttaatttatttttaaattgtttttaaaattagggaaataaaagagaatgaaattgtggtaattttttttttttttagttattagatgtatgttatttatggtgggttttggtttttttaaagataattggaagattttattggattgatagagagaaattgcgtaattttattttagtatgttaagatgaagaaacggggggatttgtagataggttaggagatatggtaagtaatatttttgatatatttttataaattattttagcgtttgtattattttatggttttatggatttttagggtggtatttcgagtgttgttttgaaagtagtttttttttttatttattgtagagtgtatgaaggatatagaataattttatagaaattttttgtcgtttgttgttaataaaattagtatatggtaaaggttaggtatttataatttgaagttaaagaagtttttattttgtgatttgtatataaatttttttttaaataggtggattttttttatattttatttggaattgttggattgttatttttgggagaagaatagattaaatttgttaattttgttttttgtatgtttgaagaagtgttttagagagtgaatgtttagtttgagttagtgagttagatttattgaattgaaagttgtatagtatagttttgttattttaatatttttgtatttgaagtgtttatcgaatttaaaagtgattattgttaatattttgtatattgtgttaaattaattttaataaattatataattatatatattgtaaaataaagatcggtattttattttttgttttttattttgaagttttgttattttgattatagttttttgtgtatatttttgtgtttgttatgtttaataattgagttaatataaaataattttaggtttttatttgattttttttttatgtatattttttatttgttttatagtaagttgatgtaaattggtttgttaataagaatgttaattgatgaaagtggatagaatttatatatgaattaaatgatgtataaaataaatggttgttgaaatttggaaatgattgataggtttgaatatggttattttgaattggttatagatttaggttaaatggtaatttattattttaaaatggggttgtgattcggattgttttttttttttttttttttttttttttttttagtattttatatattagaattatttaaagaaggagttgtttttaaataaggaaatattaacgggtaagttgatggttattatagtatttttttgtatttgttttttttttaaaaagttaaaatgggtataattatttttttttatttttttgtgatagaatttttgttgtttaggttggagcgtagtagtacgattttagtttaattgtaattttcgtttgtcgggtttaagtaatttagtcgtagtttttcgagtagttgggattatagtcgtatattattatgttcggttaatttttatgttattttagtatagatagggttttattatgttgaggagttggagattagtttgattttgtgatttatttatttcggttttttaaagtgttgggattataggcgtgagttattacgtttggtttaaaatgagtataattattttaggggtttatagttttggtgaaagtgaggtattttttatttttaaattttattttttagagatagggttttttttttttttttaggttggggtatagtagtgtaattatagtttattgtaattttaaatttttgggtttaagtagtttttttattttagttttttgagtattagggtttataggtatttgttattatgtttattatgtttagttgattttttaattttggggataggtattgttttttttaggttggttttcggaggtgaagtaattttttggttttagttttttaaagtattgggattatagggaggagttatcgtgttcgatttgaaaataaggttttttgatggaaattgagattttttttaagtatgtttggaatgttttgtgtaataattattttaagaatagagatgtttttaaggattgttgttattgtatgtgggtaaatcgttgtgtataattggtttattgagatatttaatagtggtaggattttagtagtggtgtaaattaatgttttttaatagtttttgtatggtagtatttagataatttcgttatgtttaatttatggatttttggtaagttggtattattggttttatttaaggaattttttaaaggttattattgtaaagttggagtttgaatttttagtgtgttattaattgatttatatgttagaaattatagtattagaaattggtagatggggaattgttaattgagagattttatttagttagtttttttttgttttttattttattatgtatatagttatgtgtatattattttttgataatataattattttttttatatttggttataagattaattttaggtgggttatgttgtgtgagtattatacgtttttattgtgttaaaggtattgggtgtattgtgttgggtggtttttatatttaaagataagttagtgtgtttggacgtgtgggaaatgtatgtaatatttgtaataagggagattgggtgttgtgagaataatggggttaataaatcgggtggttattgatgggttttgtagagttttggttagtttgatatttgtaggttgaggatgttttagtgaggtttatgtggaaagtgatgggtttgggaatggttggaagtagggttatagatttgaagtacgtgaatttatgtggaaagttgagtttgtttgcgtttgcgtagtgtagtttagtgcgtcggcgcgtagttttttcgttcgttttagcggcgtagtttttgtagttgggttattggaggggtcgtttagaaattttatatttttcgggttagggaaggtttgggaggatgttgaggtttgagattttattaatttcgttttttgtttcggcggttttttcgtcgtcgggagaaattcgtttattttagggttttcgttataatttcggattttaggagattttatagagtcgtttttcggtttaggtggtttttgtatttatttgttttggtacgttaggagttgcgggcgatcggagtagtagtagtagtagttttttttgtttcgcgttaaattttcggttagtttaaggtaaggagtgattgggtggaggagtttttttgaggttagaggtcggtagtttatggaggttcgggggtacgtgggtggtggttattatagtgaagttgtgatttggttggggcgtgagatttgagtgttttgggaatttggtgagtttgggtgattagaagttttgattttttaaattggttttattgtaagattttgattgtggatggtttagttttgagaaaggttgaagtattttatataacgttttttatagtgtttgataaatgatagtttgtgcgtgagtttgttgatagaagttgtgagttgatttttggttgttgaatttaattttttaaattttgttaaggtgggataaaatagattaaattgaatattttatttaatttagggaaaataatatgtttagtattaaaagagtgggttgggcggtggttgacgtttgtaattttagtattttgggaaattagggtgggcggattatttgaggtcgggagttttatattagtttggttaatatggtgaattttttatttttattttttatttttattaaaagtataaaaattatttgggtgtggtggtacgtgattgtggttttagttatttaggaggttgaggtgggaggatggcgagttcgggaggtcgaggttgtcgtgagttgagattgcgttattgtattttagtttgggtgatatagtgagattttgatttaaaataaataaataaaaaagatgtatgttttttaaattatttattattttgttagtttttatttatgataaagtattattattttttatatacgattgtaatataatggtaaagtaataaatattaaatttaatggttattttttagtttattttatgtgatttttttgttgtatttaatgtttttaatttttttatttttagaaatagagtttcgttatgttgtttatgttggttttaaatttttggttttaagtgtttttgtttcggtttgtttaagtattgggattataggtatgagttattgttgtttggtttatgtttaatgtttttgattggtttttttttaaatttttttaatttggtttttttgattttatttgtttttgtttttttgttattttttagagaattgttgtgtttatttttgtttttaaattatgggtatgttattaaagtttttttttttaggttatttttatttagatgtgattatttttatagtttagattttatttatattttagatttattttagattgttttttgaagtttttattgatggattaatggatattttaggttgattatatgattaattaaatttttttttgtattttttttttttttttgagatagagttttgttttgttgtttaggttggagtgtagtggtatggttatgatttattgtagttttaaatttttgggtttaagcgatttttttattttagtttttcgagtagttgggattaaggtatgtgtttttatagatggttaatttaaaaaatttttttgtagagatagtgtttttttacgttgtttagtttggtttcgaatttttaggtttaagcgatttttttattttagttttttaaaatgttgggattataggtgtgagttattgtatttagtttttaaatttttaagtgtttttttatttttgtagtttatttattgtattattagagttatgtggaaaatgattttattatgttttttgttatttaaattagtagatttgtatttgtaggtaaaagattaaattttttagaaggatagttaaagtaattgggatcggtttttaatttttatagatttattttttattatttaatatttattttgttttttaataaaattgagttatttgtaatttttttaaagtaatatgaatgtttatattgttagtttaatttttttttttattagatgtttggttatttatttatttattagtaatgataatatttattaatttatatgtatttattttgttttggttttttattaggtagacggtatttttgatttttataataattttgtagagtagattttttttttgtttttgttttatagatagaattaaggtttaaataggcgaataaaggtttaaattatgttagtagttggggataataatttgtgtttttaatgaatttaaggtttagtagagaagatagatttaaaaattaataaatatatatttaagaaataattgtatttgaggtatttataatttttgaggtaggtataattaaagtatggggataaaagtgggaaaagatattttatagagtaagtgtattttgaattggtttttaagaataagtaggaagaagaatgttagttaaagggaaatagttggagcgtatttttgagaaaaatacgtgtaaaggtatagaagaattatgtaaaattgttaataattttgtttggttagagtaggagagtgatttaggtagataaatttgaatgtagatatagttgtgagaattagatttgggagataaatttaatttagagattttttatatttaatattaggtttttggttttggtgattggatagatggtagtagtattttttgattttgggaattttgtaggtaaagtaaattttagagggaagatgatgagttttgttatggatatgttgagtgtgaaaagtttgtgggatatttatatatttatattaagataattgaatataggaaattagagttaagaagagagaaatttgagggaaatatggatttgaaagttattagtatgttgggattatagtagagaatatgaagattatatagtaaaatagaggttaaggaagtaggaggagaattaagataagtgaatgagttttaagaaagggtatatagtttaaaagtagtttgagaataagaaatagttttttttatttttagttttcgtatttttagtttttggtaattatttttttttttagttttttaaagtttagaaatgttaatggagtatattttatgttggttttatatacgtttttatgatagtatttttatattttgtttatatttttgtaaatattttttttattaaattattttagtttgagtatattattgatttttgttggaatttatataatgaagttatattttattttatggtgagtatggggagatatataggaattgtaagaaagagagatattgattagatttgttttttagaaagattattggtgatgattcgaagaatagattagagaggtgtaatattggaagtaaggagaagaagaagtaggaaatttgtataaggattaaagaagatataggtttaaaatgggttgggaggagtagagagggatttaaattttagtgatgttaaaaaaaaagaattttagtatttagttattgagtgttagggttgatgaaggaagaattgagaatgttttttaagtttatgatttgagtgataagggataagttggtataattaattatattggtaataaagaattaattttgagggaaagatagagtttatttttggatatttagaatgttgggaagatatttaaaggtttatgtttaagagatagatatagtgatttggagttatattgtttgatagaatattttgtgataatagaaacgttttatatttatgttgttcgatgtggtaattagtagtcgtatgtggtttttgagtatttgaaaatgttgttagtgtgattgaggaatagaatttaaattgtatttaattttgatttagttaaatatttatatatgttgttttattgaataatgtaggtatagagttgagaacggtttttgtatttttgaaggattaaagaattaagaatattttgtgatattaaaattatatgaaatttagaatttaatatgtagaaataaagttatttttaattgaaatatagttatttttatttatttatgtattatttatgattgtttttttatgatagtgttagagttgagtaattgtgatagtgattatatggtttataaaagtttaaaatatttgttatttggttttttatttaaaagtttatgggttgggtatgatggtttatgtttataattttagtattttgggaggttgaggtgggtagattatttgaggttaggagtttatgattagtttggttaatatgataaaattttgtttttattaaaaatataaaaaaaaaatagttaggtgtggtgggtatgtttataatgttagttgtttgggaggttgaggtaggaggattgtttgaatttgggaggtagaggttgtagtgagttgagattgcgttattgtattttagtttgggtaataagagtgaaattttattttaaaaaaaaaaaaaaaaagtttatgttgaggtatggtggtttatgtttgtaattttagtgttttgggaggttgaagtgggaggattgtttgaggttaggtgtttgagattagtttgggtaatgtagtaagattttgtttttataaaaaaaaaattagttgtgtgtggtgaggtgtatttatagtttatagttatttaagaggttgaagtaggaggttatttgagtttatgagtttgaggttgtagtgagttgtgattatattattgtattttagtttgggcgataaagagagattttgtttttataagatagtaaaatagattgggtatggtggttttcgattataattttagtattttgggaggttgagatgggaagattatttgagtttaggagtttgagattagtttgggtaatatggtaaaattttatttttataaaaatataaaaaattagtttggtatggtggtatgagtttatagttttagttattcgggagggtgaggtaggaggattgtttgagtttaggagtttaaggttgtatttagttaagattatattattgaattttagtttaagttatagaacgagagttttatatatagataaaaaggaaaaattaaaagtttagtaatttttggtttatagtttaaggagtcgttatagttatatacgaaggtttgagagttgttagaaaatagatgttaatagaaataaagaggagagatgagatgtttggagatgtataatgttgatttgtgagggaaagtttaaaagtatgaagttttggaggttaatagttaagaagtagaggaaaaaggagatggtaaaggaaattaaaagtggtttaaagagaatttaagatagagagttgtggaaattaaagagaataggtgaatagagtttaaatattttaaaatttttttagaatttttatgtgttaagaggttatgttaggttgtttatgtatattatttaaaaattttatgataattttgtaaaataggtaatagtttatattagtagataagtatttaaataaggaattgaagttaattgagtttaaaatgttatttgtataggggagagaaatttaatgaagaaattaatagaagaaggttaaaagaggtttaataattattatataaatgaaatatatgttttagtttgtattttgttgtttttaaaagaatatttgaaattgggtgattattaagaaagaaaatatattttttggaagtttggaggttgggaagtttaaggttaaaggaggtatatttagtgagggtttttgtgttggtggagtttttgtagagttttgtagtggtatagggtattatatggagagggagttgagtatggtagtttaggttttttattttttttttataaaattattagttttattttcgtgataatttattaatttattaaattatgaatggattaatttatttatgaaggtagagtttttatgttttattattttttaaaggttttatttttgttttgttatattttattggggattaaattttaatgtaagtttcggaggggatagatatttatattttagtaatatatttggtatatttgaagattaaagggtaatttatgattttagttagagtagttgtagtgaatttgtagaggtaaaagttatattagtatatttttgtatatttattaataatgttattaattttgttataatttgtttatttttaaaaattatttttatatgaaattttatagaaagtgaatatagtggttgggtgcggtgatttaggtttttaattttagtattttgggaggtcgaggtaggtagattatgaggttaggaattcgagattagtttagttaatatggtgaaattttatttttattaaaaatataaaaatttattaggcgtggtggcgggtgtttgtaattttagttattcgggaggttgaggtaggaggattatttgaatttgggaggtggacgttgtagtgagtcgagattatgttattacgttttagtttgggcgataagagtaagattttgttttaaaaaagaaaaaaagaaaaaaaaggaaagtgaatatggtataaattataatgattaatatattattgtataatttaaatttttaagaattgattgttaattttttaaatttagg

SEQ ID NO: 257 - DNA, 11787 bp, Artificial Sequence
  chemically treated genomic DNA (Homo sapiens)
tttaaatttgaaaaattaatagttaatttttaaagatttgaattatgtaatgatgtattagttattataatttatattatgtttatttttttttttttttttttttttttttttgagatagagttttgtttttgtcgtttaggttggagcgtagtggtatgatttcggtttattgtaacgtttattttttaagtttaagtgatttttttgttttagtttttcgagtagttgggattataggtattcgttattacgtttggtgaatttttgtatttttagtagagatggggttttattatgttggttgggttggtttcgaatttttgattttatgatttgtttgtttcggttttttaaagtgttgggattagaggtttgagttatcgtatttaattattatgtttattttttataaaattttatgtgaaaatgatttttgaaaataaatagattataataaaattaatgatattattgataaatatataaaaatatgttaatatagtttttgtttttataagtttattgtaattattttggttaaaattataaattattttttaatttttaaatatattagatgtgttgttaaggtatgaatatttgtttttttcgaaatttatattgaaatttaatttttagtgaagtgtggtaggatagaggtggggtttttaagaggtgatggggtatgagggttttgtttttatgaatgaattaatttatttatgatttaataggttaatgggttattacgagagtaggattggtggttttataagaagaggatgagagatttgagttattatgtttagttttttttttatgtgatgttttgtattattataggattttatagagattttattagtataaagatttttattaaatgtgttttttttgattttggattttttagtttttagatttttaagaaatatgtttttttttttgataattatttagttttaagtatttttttaaaagtaatagaatatagattaagatatatgttttatttgtataataattattagattttttttaatttttttttgttaatttttttattgaattttttttttttatgtaaatggtattttagatttaattggttttagttttttatttaggtatttatttattgatgtaagttattatttattttataggattgttataaaatttttaaataatgtatataaataatttagtatagttttttggtatatagaagttttaaaaaaattttaaaatgtttgggttttgtttatttattttttttgatttttataattttttattttgaattttttttaaattatttttagttttttttgttatttttttttttttttgttttttaattgttggtttttagggttttatatttttaagtttttttttataaattaatattatgtatttttaggtattttattttttttttttgtttttattaatatttattttttgataatttttaagttttcgtatatagttgtaacgattttttaaattgtaaattaggggttgttaaatttttaattttttttttttgtttgtatgtgagattttcgttttgtagtttaggttggaatttagtggtgtgattttggttaaatgtagttttgaatttttgggtttaagtaatttttttattttattttttcgagtagttgggattataggtttatgttattatgttaggttaattttttgtatttttgtagagatggggttttgttatgttgtttaggttggttttaaatttttgggtttaagtgatttttttattttagttttttaaaatgttgggattataatcgggagttattatgtttagtttattttattgttttataaagataaggtttttttttgtcgtttagattggagtgtagtagtgtgattatagtttattgtagttttaagtttatgggtttaagtaattttttgttttagttttttgagtaattatggattataggtgtattttattatatatagttaattttttttttatagagatagggttttgttatattgtttaggttgattttaaatatttggttttaagtaatttttttattttagttttttaaagtattgagattataagtataagttattatgttttagtataaattttttttttttttttttgagatggagttttatttttgttgtttaggttagagtgtaatggcgtaattttagtttattgtagtttttgttttttaggtttaagtaatttttttgttttagttttttaagtagttggtattataggtatgtttattatatttggttattttttttttgtatttttaatagagatagggttttgttatgttggttagattggttatgaatttttggttttaggtgatttgtttattttagttttttaaagtgttgggattataggtatgagttattatgtttagtttataaatttttaaataaaggattagatggtaaatattttaggtttttgtgggttatataattattgttataattatttagttttgatattattatagaaaagtagttatagataatatataaataaatgagaatggttatgttttaattaaaaatggttttatttttatatattgaattttaaattttatataattttaatattataaaatatttttgattttttaattttttaaaagtgtaaaaatcgtttttagttttatatttgtattgtttaataaagtagtatatgtgagtatttaattaaattaaaattaaatataatttaaattttgttttttagttatattagtaatatttttaaatgtttaaaagttatatacggttattagttattatatcggatagtataagtatgaaacgtttttattattatagaatattttattagataatgtagttttaggttattatatttattttttgggtataaatttttaggtatttttttagtattttaaatgtttaaaagtgaattttattttttttttaaaattaattttttattattagtatggttaattgtattagtttgttttttgttatttaagttataagtttaggagatatttttaattttttttttattaattttaatatttagtgattgagtgttagaattttttttttttaatattattaaaatttaaatttttttttattttttttagtttattttaagtttgtattttttttggtttttgtgtaagttttttatttttttttttttttgtttttagtattatatttttttaatttatttttcgaattattattaataatttttttgaaaagtaaatttgattagtattttttttttttataatttttatgtgtttttttatatttattatagggtaaaatataattttattatatgggttttagtaggaattaatgatatatttaaattgggataatttgataaagagaatatttataaaggtgtggatagggtgtaggggtgttattataaagacgtgtgtagaattagtataaaatgtgttttattagtatttttaggttttagggagttaaggaagagagtggttgttagaaattggagatgcggaaattggagatggagagggttgttttttgtttttagattatttttagattatatatttttttttgaaatttatttatttgttttaattttttttttatttttttgatttttattttgttatatagtttttatattttttgttgtggttttaatatattggtaatttttaaatttatattttttttaagtttttttttttttagttttagttttttatatttaattattttaatataaatatatggatattttataggttttttatatttagtatgtttataatagagtttattattttttttttaaaatttgttttgtttataaaatttttagaattagaaaatattattattatttatttagttattaaaattagagatttggtgttgaatatggggggtttttgggttaaatttgttttttagatttaatttttataattatatttatatttaagtttatttatttagattatttttttgttttagttaagtaaaattattagtagttttatatgatttttttgtgtttttgtacgtgttttttttaagaatgcgttttagttgtttttttttggttggtatttttttttttatttatttttgaagattagtttaaggtgtatttattttgtgaaatgtttttttttatttttgtttttatattttaattatatttattttaaaaattataaatattttaaatatagttattttttaaatgtgtatttgttgatttttaagtttgttttttttattgaattttaagtttattgagagtatagattattatttttagttgttaatataatttgaatttttgttcgtttatttgggttttggttttatttgtaaaataggaataaaaaaaaaatttattttgtaaaattattgtgaggattaaagatatcgtttgtttagtaagaagttagaataaagtaggtgtatataaattagtgaatgttattattattgataaataagtgggtgattaagtatttgatgaagagagggattagattgataatgtgaatatttatgttgttttaaaggaattgtaagtagtttagttttgttagaaagtagggtaaatattaaatgatgagggataaatttgtaaagattagaaatcgattttaattgttttggttatttttttagagagtttgattttttatttgtagatataggtttattgatttaagtggtaagggatatgataagattattttttatataattttggtggtatagtaagtaagttataaggatggaagaatatttaagagtttgagggttaggtgtagtggtttatatttgtaattttagtattttgggaggttgaggtaggaggatcgtttgagtttagaagttcgagattaggttgggtaacgtaggaaaatattgtttttataaaaaaattttttaaattagttatttgtaggggtatatgttttggttttagttattcgggaggttgaggtgggaggatcgtttgagtttaggaatttgaggttgtagtgagttatgattatgttattgtattttagtttgggtaatagagtaagattttgttttaaaaaaaaaaaaaaagtgtagagaggaatttaattaattatatagttagtttgaggtatttattagtttattaataaaaattttagaagatagtttgaagtaagtttggagtgtagatgagatttgagttgtggagatagttatatttaggtagaagtggtttaggaaaaaaagttttaatgatatgtttataatttgggaataaaggtgggtatagtaattttttgggaggtagtagaaaaataggggtaagtggaattaaggaagttaaattaaaagagtttaagagaagattagttaagaatattaaatataggttaggtagtagtggtttatgtttgtaattttaatgtttgggtagatcgaggtaggagtatttgagattaggagtttgagattagtatgggtagtatagcgagattttgtttttaaaaataaagaaattaagaatattaaatatagtagaaaggttatatgagatgaattgaaaaatgattattggatttggtatttgttattttattattgtgttgtaatcgtgtgtgaaaaatggtgatgttttgttatgaatagagattaataaaataataaatgatttgaaggatatgtattttttttgtttgtttgttttgagttagggttttattgtgttatttaggttgaaatgtagtggcgtaattttagtttacggtagtttcgatttttcggattcgttatttttttattttaattttttgagtagttgggattatagttacgtgttattatatttagataatttttgtatttttagtagagataggggatgggggtgggaggtttattatgttggttaggttggtgtggaattttcggttttaagtgattcgtttattttggttttttaaagtgttgggattataggcgttagttatcgtttagtttatttttttaatattaaatatattattttttttgaattagatgaaatgtttaatttaatttattttattttattttagtaggatttggagaattaaatttagtagttaaagattagtttataatttttattagtaaatttacgtataaattgttatttgttagatattgtgagggacgttatatgggatattttagttttttttagaattgagttatttatagttaaggttttgtaatagaattaatttgaaaagttaaggtttttaattatttagatttattaaatttttagggtatttagattttacgttttaattaaattataattttattgtggtaattattatttacgtgttttcgagtttttatgaattgtcggtttttagttttaaggagatttttttatttaattattttttgttttgagttggtcgggagtttggcgcggggtagggaaggttgttgttgttgttgtttcggtcgttcgtagtttttgacgtgttaggataggtggatgtagagattatttggatcgaagggcggttttgtggagttttttggagttcgaaattgtagcggggattttgaggtgagcgggtttttttcgacgacggggaaatcgtcggggtagaaggcgaggttgatgagattttaggttttagtatttttttaaattttttttgattcgagaagtatgaggtttttgagcgatttttttagtagtttaattatagaagttgcgtcgttgaaacgggcgggagaattgcgcgtcgacgtattaagttgtattgcgtaggcgtaggtaggtttagttttttatatggatttacgtattttaggtttatgattttgtttttagttatttttaaatttattattttttatatgaattttattggaatatttttagtttgtaggtattagattgattagaattttgtaaggtttattaatgattattcgatttgttagttttattatttttatagtatttaattttttttattgtaaatgttatatgtattttttatacgtttaagtatattagtttatttttaaatgtagaaattatttaatatagtatatttagtgtttttgatataatgagaacgtgtaatgtttatatagtataatttatttaaggttgattttgtgattaaatataggaaagatagttatattattaaaagatagtatgtatatggttgtgtgtatagtagagtaggaaatagggaaagattgattgggtaagattttttagttaataattttttatttattaatttttagtattgtggtttttaatatataaattagttaatggtatattagaagtttaaattttagttttgtagtggtgatttttagaaaattttttaaataaggttaatagtattaatttattagagatttatggattaaatatgacgaaattatttggatattgttatatagaagttattagaagatattaatttatattattattgaaattttgttattgttgagtattttaataaattagttatgtatagcggtttatttatatgtagtgataatagtttttaagaatatttttgtttttggaatgattattgtatagggtattttaaatatatttgagaaaaattttaatttttattaaaaaattttatttttagatcgggtacgatggtttttttttgtaattttagtattttgggagattgaggttagaggattattttattttcggagattagtttggggaagatagtgtttgtttttaaaattaagaaattagttgggtatagtgggtatggtggtaggtatttgtagattttggtatttaggaggttgaggtggaaggattgtttgagtttaggagtttaaggttatagtgagttgtgattgtattattatgttttagtttggggaagaaaggaagattttgtttttaaaaaataaaatttaaaaatagagaatattttatttttattaaaattgtaaatttttagagtgattgtatttattttaggttaggcgtggtggtttacgtttgtaattttagtattttgggaggtcgaggtgggtggattataaggttaggttggtttttagttttttagtatggtgaaattttgtttgtattaaagtaatataaaaattagtcgggtatggtggtgtgcggttgtagttttagttattcgagaggttgcggttgaattgtttaaattcggtagacggaggttgtagttaagttgagatcgtgttgttgcgttttagtttgggtaatagagattttgttataaaaaaataaaaaagagtgattgtatttattttagttttttaagaaaaagataggtgtaaaaaaatattgtggtgattattaatttattcgttagtgtttttttatttgaagataattttttttttgggtaattttgatatataaaatgttaaaaaaaaaaaaaaaaaaaaaaaaaaaaaggatagttcgaattataattttattttaagatggtagattgttatttaatttaagtttgtgattaatttagaataattatatttaaatttattaattatttttaaattttaatagttatttattttgtgtattatttaatttatgtatgggttttatttatttttattagttaatatttttgttgataaattaatttatattaatttgttatagaatagatgaaaggtatatatgggggaaaaattaagtagaaatttagagttattttatgttagtttagttattgaatataatagatatagaagtatatataaagaattgtagttagaataataggattttagaataaaaagtagaaaataaaatatcggtttttattttataatatgtataattatataatttattaaaattaatttaatataatatataaaatattaatagtagttatttttagattcgataagtattttaaatatagaaatgttaaaatggtaaaattatattatgtaatttttaatttaatgaatttagtttattagtttaggttgaatatttattttttgaagtatttttttaggtatgtaaaagataggattaataggtttaatttgttttttttttaaaagtgataatttagtaattttaaataaggtatgaaaaggatttatttatttaaaaaagaatttatatatagattataaaatgaaaatttttttaattttaaattatgaatatttgatttttattatatattaattttgttagtaataagcgataagaaatttttgtaagattgttttatattttttatatattttataataaatagaaaaaaaaattgtttttaaagtaatattcggaatgttattttggaaatttatggaattatgaagtaatgtaaacgttgaaataatttatagaaatatgttagaaatattatttgttatattttttggtttgtttgtaaattttttcgtttttttattttgatatgttaaaatgaaattacgtagtttttttttattaatttaatgaagttttttaattatttttagggaagttaggatttattatgagtagtatatatttggtaattaggagggaaaaaagttgttataattttatttttttttatttttttaattttgagaataatttaaaagtgggttaagttttatttttaggtaatttgatgtttaaagtgttaaattatgtggaaggacgaaatttagggatatattgatatgtagggtatgaaatatttgtttagaatgaaagataattaattaatgggtaagaagagattaaattttaatttataggtaattatgttaaatattttagtatttattgataagtatgtatttgttttgtttttatttgtaatgaatgtttaatttagttttttaattaagaagttagtagtataattatgaaatttatgggtatagttttgtttttttataagtattgtttaggggggtatatatttgtttaaaattaattaaatttttgttttttaaaatatggtgatagaagtttataaagaaaattttatttaaggttgattttattttaatgagatttttgagtaatttatagatttattagaagttgttttagattgtgtgtaagtgtaggtttcggtgttttttacggttatttatttttttgttgatagttttttaggttttttattttattttattgtagatagttattgcgggtgtttttttattcgttgttatttagaaatattaaggtttaaaaataaaaatataggtcgagtatagtggtttacgtttgtaattttagtattttgggaggttgaggcgggtagattatttgaggttaggagtttaagattagtttgatgaatatggtgatattttatttttattaaaaatataaaattggatgggcgtggtggtgtatgattgtaattttagttattgtattattacgttttatttagagggtaggggtatagtaagttataatttttgagttaaatttatagtgtaggaatagtttttatatttataaattatttaaatatagttttgggttaggtacggtggtttacgtttataattttagtattttgggaggttgatgtaggtagattacgaggttaggagtttgagattagtttggttaatatggtgaaatttcgtttttaataaaaatataaaaattagtcgtgcgtttgtagttttagttatttgggaggttgaggtagaattgtttgaatttgggaggcggaggttgtagtgaattaagatggcgttattgtattttagtttgggtaatagagtaagattttatttgatataggaaatataagtatatttatttataataattgtaattggaatatagttatatttatttattttttattatttatggttgtatttgttttataggataattatatagttgtaaatgagtatttattatttgttttttatagatttgataagagagatttattatgtggaggaaaatttaataattttttttttaaattaaattatttgggtattttttaaataagaagattgtaaataaaaattttgtagtttaatttttaaaaaatttaatttgttaaaattaattgtttttaaatatggagatttttgtataagattgtttggaaatggatattaggattaatgagtattttaatttatgggggtttattttgttaaggggagttttttagtaggatatattattgaaaatttataatagggaaaggtaataaataagtttatggttaatttataatatagaaataggtaagataaagtagtagtatttatttaaggttttaaagttagtagaatatggtttattaaataatatttttttcggttttttattgagttcgtttgagggtaattgtcgtttataaagttattagttaagtaaattagaatttatttgatgtaattgatttgtaattgttagaaattttgtgtaataatagatttaaaattatagatataaagtttatgtgtataataattttttgatattaaaagtgataaaatttaaattattaaaatattattttatattttaagtttttttttttgatttgatatttaaaattttaaatatgtattaatattatatatttgaaaaaatttaagtatattattattagtatgtaattttgtattgaaatattattgttaaaatttttttatggttagtattttata

SEQ ID NO: 258 - DNA, 2455 bp, Artificial Sequence
  chemically treated genomic DNA (Homo sapiens)
ggagtgtaagaatatagaattaaaatagagtttgaaatttaaagaaagggagagatttgggggaggagtggggtggagtgacgtgatgtgttgttggaaattagtagttggtggtttttttttgtgtttttttttttgtgggtttttttttgtttgtgggagggttttttttttttttttcgatagaaaggttatttttggtgttcgtttttttgaattgtaatattttgtaagggtatgattttatgtttttgtgtgggtgtgaatttttttatggtgatttttaaaatttgtatataggatttttttttattgaggggaggggattaaaataattttattttttagggtttttttttgttttaattggtttgtgtttaagagaagttttaggtaaatggggttagtttgaagattaaataggtttggtagtttttttcggtttttttttttttttttatagttttatagttatagttgttttgatattaatattgattttggttggttggtatgattatttatagggtatcgtgttttaatttattaggtgataggtaacgttgtttttttttggaattatttagtagagttagggttgtatttttaaattttgtaatagaggtttttttttattttatttttttgtttttgtattttttttattttagtagtttttttttttttttttgggtttttttttttatttttttttttttttgggtttggtaaattagtttttaatttttttatattttagattggaaggtgggtttttttttgatattttttagagttgttattaattttttttaagtttttatagttttattgtttaatagatttgttaggggtaattattaatttagtttttaattttgtttttttattttttttgttggaggggattttttaattattggttagtatagttaggttattttatttttattattttttttaattttttgggttggggggttggggaggaatttttttattttagggtattaggaataaagttggggaggatggtgtatttaaagggattatatatatatatatatatatttttttttttttttttttataattttattttcgtaatatatatatatatatatatatatatatatatatatatatatatagacgtataaataagttttatggagtagtgattttattatgtttatcgttttgagtttaatttttggtttaaaataggtattaaatagttgtcgaatgtatgaatgatagatatttttttgtttttaggggtgtgtagaagtgcgaaggggtatgggtatgttttagtaggggtgtgagtgttttgattagaattatttttttttgttagaatttgatgtaattcgaatgtttttatttttgtttgaagggtttaaataataaattaggttttgtcgtgttattatgggggtggttatattttgtatttaggaaataggtacggtagggttgagatagaagttttgtttgttttcgtttatttatttgaaatatcgtttatttaggttttattttgtttgttaggtattgttttaagttttgtataaatattaatttagagggtataaatattaatttaagagttgttgtaggaaaaaaaataagcgtttttggttttttaagtttggttttttttttaaaattttcgtaacggttttaaattttttttagggattgggattacggattttggttcgattttttcgcgggttttttattgcgttaattaaattttagaaatagtgagtgttagaggttcggttgttaagtaacggtagagggcgggaagtttgaacgttttggattcgtttcgaaggtaaataggttaattagcgtttagattttttagttacggtagttcgtttttttttttcgttttgtcggatttttaggttggattcgggtttttttaattaatagcggttaggagggcggggcgcgtgcgcgcgtatttcgtttacgcgtcggcgcgttttttttgtaggttcgtggcggtcggttagcggggcgtttttttatttgtagcgatttaggttattgaaaaggcgggaaaacgttgcgatggcggtagttgggggaggaggaagataagcgcgtgaggttggggttttggcgcgtggttggtagaggtagagatataagacgtgtacgattcgttttatagggtttttagattttttttttttaaagggtaattttcgcgtgataggaatgagggtggggcgcgtggagttttttataatttgtattttagttaaatattcgagaatttattttttgtgtttatagttttttacgttttttagttttgtttcgtagttttgtagtagaagtatttagtgttttgtattttgcgcgttattttatttcggttttttttgtgaatcgttgttttcgaatcgtttttattttttgtattcgtaga

SEQ ID NO: 259 - DNA, 2455 bp, Artificial Sequence
  chemically treated genomic DNA (Homo sapiens)
tttgcggatgtaaaaagtgagggcggttcggaagtaacgatttatagaggaggtcggggtagggtggcgcgtagaatgtaaagtattaagtatttttgttatagggttgcggggtagggttgaggggcgtggagagttgtggatataggaggtgaattttcgggtatttaattaaagtatagattgtgggaaattttacgcgttttatttttatttttgttacgcggaggttattttttggaaggaaggggtttgagggttttgtggggcgagtcgtgtacgttttatgtttttgtttttgttaattacgcgttaggattttagttttacgcgtttatttttttttttttttagttgtcgttatcgtagcgttttttcgtttttttagtaatttgagtcgttataggtgggagaacgtttcgttgatcgatcgttacgagtttgtaaaaggagcgcgtcggcgcgtgagcgaggtgcgcgcgtacgcgtttcgtttttttagtcgttgttgattggagaggttcggatttagtttagagattcgatagggcgaggaggagaagcggattgtcgtagttgaagagtttggacgttgattggtttatttgttttcggggcgggtttagaacgtttaaatttttcgttttttgtcgttgtttagtagtcgggtttttagtatttattgtttttgggatttgattggcgtagtgggaagttcgcgagaaggtcggattagggttcgtagttttagtttttggaaggggtttgggatcgttgcgggggttttgagggggaggttaaatttaaagagttagaggcgtttatttttttttttgtaataatttttaagttaatatttgtattttttgagttaatatttatatagagtttagaatagtgtttggtaaataaagtaagatttaaatgagcggtgttttaaataaataagcggaaataagtaggatttttgttttagttttatcgtgtttgttttttgggtatagggtatgattatttttataatggtacgatagggtttaatttattatttaaattttttaagtagaggtggaagtattcgaattatattaaattttggtagagagaagtagttttgattagaatatttatatttttattgggatatgtttatattttttcgtatttttatatatttttgaagatagagaggtatttattatttatgtattcggtaattatttagtgtttattttgggttaggggttggatttaaagcggtgaatataatgaagttattgttttataaagtttatttgtgcgtttgtgtgtgtgtgtgtgtgtgtgtgtgtgtgtgtgtgtgtgtgtgttgcgggggtggggttatgagggagaaagaaaaaaaatatatatatatatatatataatttttttaaatgtattattttttttagttttgtttttagtattttgagatggggagatttttttttagttttttaatttaagaagttaggaaagatggtgggggtgagatgatttagttgtgttaattagtaattggaaaattttttttagtaagaaaggtgggggaatagagttaagggttgggttaatggttatttttggtaaatttgttgagtaatggagttatagaaatttggaggaggttggtgatagttttggggagtgttagggagggatttattttttaatttggggtgtgaagagattagggattagtttattaagtttaggaaggggagggagtggaaagagaagtttagagagggaaagaggagttattgagataggagaaatgtagggatagggaggtgagatggagggaaatttttgttgtaggatttgggggtatagttttggttttgttggatggttttaggagagggtagcgttgtttgttatttggtaaattaaggtacgatattttgtgggtagttatgttagttagttaaagttaatattgatattaaggtagttgtagttataaagttgtaggagagaaaagagaggtcgggagaggttgttaaatttgtttgatttttaagttggttttatttatttaaggttttttttggatatagattagttggaataggagaggattttgagaagtagagttgttttgattttttttttttaatgggaaggggttttgtgtgtagattttgagggttattatgagggaatttatatttatatagaggtatggaattatatttttataggatgttatagtttaagggaacgaatattaaagatagtttttttgtcgggaggagagaaaaaggtttttttataagtaggagaaaatttatagaagaggaagtataagaggaaattattaattgttggtttttagtagtatattacgttattttattttattttttttttaagtttttttttttttttaagttttaagttttgttttagttttgtgtttttgtatttt

SEQ ID NO: 260 - DNA, 2932 bp, Artificial Sequence
  chemically treated genomic DNA (Homo sapiens)
gttaagaataaaatatattaagataaggaaaatttgtagttaagaatagaaaaaaattatggttttgaagtatgagttatttaaagaaagtggaaatatttttagattatgtagtaaaaaataaagtgattttttttttttaaatttatgtaataaattgataggtaatatgtgaaagttatagaatgtagattagaggatataataaatttattttttttatgtttataagaagtaagaaaagttttgatgtgagttagtattgttttataattttgaattgtgtagattgtatgtatttttttttagtttgaagtaaatagtggataggaaaaaatattaaatgttggtagtaaatatggaaggaaattataattaatgtaatatgttaaaatatgttatgtttattttattaatttgaattaaaatgtaagaatttaaaatgttttggaaaaatatgggtattgatttgatgtttgaagttttaaaatattatatattttgaaatagtatttgtattttgaaatatttgtttttatatattttttaaaatttttttttttttttattttatttattattaaataaaggatgaatagatgtaatttagaaattgttaagtatgttgaagaaagattattgtagaaaaattttttttagtttttttaaaggtgttaggaagtagaaaggtgatatagaattggagaggttggagtttttgtattaattgtattaaatgtgaattttgagaaaattttttttaattatgttttgtagttatatggatatgaagatttatgtgaattttgaaagatgtgtttatataagttgaaatgtttttaatgatttagttgatgtgtgtttttttatttgttttttttagagaggtgtaatggaagttagaatattttttttggaaatttaatttgttttgtagttttttgaggaattagtatttagttaatttgggttgggagtagttatttgtggtgaggttgattggttgggtaggaatagtgttggggtgtgggttgagtatagttgttttgttttttttgttataggaagtttgagtttatttgagtagtggtttttttaagtttaaagaagtagaggttgttgtttgttttttttaggtttttttattaaagttggagtatttttttttaaaattttatgttttggtggttgttttaaggagtgtgaggtaggggtatgtaaagttgggagttattatgggatagtttttaagtgttaggtttttagattttttgaatttggtttttatgggagaagggttttttgaggtgtggatagtgtgaagttttttggtaagtttatggggattaagtggggttagatttagatttaggagtttttggagtagtgtttaaattgtagtggtattggattatgttgtttggagtgtgtatagtttgtgtggtgtggggatttgttttttgagtttgtgggtggtgggtgggaggaagtattgtttgtggtgattggaattgggagggagaattgtattggtggtgggtaaagtttagaatgtgttgttagatttttaattttgtttttgtggagatgttggagattttgtgtataggaaagtttttgtagtgtttattgtggttagagtagttggggtattaatggtgggtgtttttttttattgttttttggttttgatgggggattagaggttagttttatttttagtgtgtttgaggtttatgtatttggttaatgagttgtggtttttttttaggttgggatggattttgaaggggattgtaatggaggagtaaagaagaagaatttttttaaattgaataataaaaggtaattagtttgttttatttttatagtttatatagttgtgagatttgagtaatttatttttagtttttagttttgaaataaatgatatgttgttgtttttaattatttttaagaaatgtaagttagtttttggaattaatatttttgtttagagtagaagtttgttggttgagtggagtatagtatatgtattttttttgttttttttgtttttttttttaatgatatataatattttatatatttatgaaatggggtatatggaagtgttttttatatgtttggaatgtgtaatgattaagtttgggtatttgaaggatatattattttaggtatattttatttttatgtgttgataatattttaagttttttagttattttgaaatatataatatattgttaattgtagttatttttgtttgttattgaatattggaatttatttgttttatttaattgtttttagttatttattaatttttttttattttatttttttattttttttggttttttttttttagttttggtgtgttttttttttagtttttttgttttagataggtggatgtttatatgtgtttttgttttatgaatttttgttttttaagtggtgttggttgtttatatgtgagttatatgttgttggtgatttgttttgtggtttaggtttttgtttttggtaaatggttatgtaaatattgtgtttgtggtttggttgatgagatagaaggttaaaagtatatttaggttgttaattggtaataaatatttgtatataatattggtaatgtaattatatagggaaaataattatttaaagtaaattttgattatggtgttttgtttttatagaatatttaaaattttattaaatagatttattgttagtagtaaattgtaaaatagattagtaagtttaataatattagaaattgtaatgtaaattataagataaattagttaaatatattaatattataagaaattaagttttttagtgtaagagaaaaaatataaatgtggaaattaaatatatttttaaaaataatgttaagtttgaattagaaattttaatatgaatt

SEQ ID NO: 261 - DNA, 2932 bp, Artificial Sequence
  chemically treated genomic DNA (Homo sapiens)
aatttatattgaaatttttaatttaaatttaatattatttttaaaaatgtatttgatttttatatttgtatttttttttttatattgaaaagtttggttttttataatattaatgtgtttagttaatttattttataatttatattatagtttttaatattattaaatttattagtttattttataatttattattaataatgaatttatttagtgaagttttaaatattttataaaggtagagtattatgattaaaatttattttaaataattattttttttatatgattatattattaatattatatatagatatttattgttagttaataatttaaatgtatttttgattttttgttttattagttaggttataaatgtgatgtttatatagttatttattggaagtaagagtttggattatagagtagattattagtagtatatggtttatgtgtgggtgattaatattatttgaaaagtagaagtttataagatagaaatatatatgagtatttgtttgtttggggtaggaaagttgagaaagaggtatattaagattaagggaaagaggttgggaagggtaaaaaggtgaaatgaaaagaggttggtgaatgattaagaatggttggataggataaataagttttaatgtttgatagtagatgagggtgattatagttagtaatatattgtatattttaaagtagttagaagatttaaaatgttattaatatatagaaatgaaatatatttaaggtgatgtattttttaaatatttggatttgattattatatattttgggtatgtaaaaaatgtttttatgtattttattttataaatatgtaaaatattatgtattattaaaagaaagaataaaaaagatagggaaaatgtatatgttgtgttttatttagttaataaatttttgttttaagtagggatattgattttaaaggttagtttgtgttttttaaaaataattaaaaataataatatgttatttattttagagttggaggttagaaataaattatttaaattttgtaattatgtaaattatgaaaatgaaataagttagttattttttattgtttagtttaaaaaagttttttttttttgtttttttattgtggttttttttaagatttattttgatttgaagagaaattgtagtttattagttaaatgtatgagttttaggtgtgttggaggtgagattaatttttagttttttgttgaagttagagagtagtaagagggagtgtttgttgttgatgttttagttgttttggttgtgatgggtattgtaggggtttttttgtgtgtggggtttttagtatttttatgaaggtagagttgggggtttggtagtgtgttttggattttgtttgttgttagtgtgatttttttttttggttttagttgttgtggatgatgtttttttttatttattgtttgtgggtttagagagtaggtttttgtattgtgtgggttgtgtgtgttttgggtaatatggtttagtgttattatggtttgggtgttgttttaggagtttttgagtttagatttaattttatttggtttttatggatttgttagaggattttatattatttatgttttaagaagttttttttttgtgaagattaagtttaggaaatttgaaagtttgatatttgggaattgttttatagtagtttttagttttgtgtgtttttattttgtgttttttggaatggttattaagatgtgaaattttggaagaagatattttgattttagtggaaagatttaaaggaaatgaatagtggtttttgtttttttgagtttggaagagttgttatttgaatgagtttaggttttttgtggtaaagagagtgaagtggttgtgtttagtttatgttttggtgttgtttttgtttagttaattagttttattatagatgattgtttttggtttggattgattgaatgttgattttttgagaaattgtgaaataggttgaatttttaggaggaatgttttggtttttgttgtatttttttagaaagggtaagtagagaaatgtgtattagttgaattattggggatattttaatttatgtagatatgttttttaaagtttatataagtttttatatttatataattataggatgtagttaagggaaatttttttgggatttgtatttaatatagttaatataaaaattttgatttttttaattttgtattatttttttgttttttaatatttttgaaaaggttaggagaaatttttttgtagtggtttttttttagtatgtttgatagtttttgagttatatttgtttattttttatttgatgataaatggaatgaaagaaaaaggaagttttaaaaaatatatagagataggtattttaaggtataaatgttattttaaagtgtgtaatattttaaaattttagatgttagattaatgtttgtgtttttttagggtattttaaatttttatattttaatttaaattagtaaaataaatatagtatgttttagtatattatattagttgtaatttttttttatatttattgttaatatttaatatttttttttgtttattatttattttaaattgaggaaaagtatgtgtaatttgtataatttaaaattgtaaagtaatgttaatttatattagagttttttttattttttatgaatatagaggaaataggtttgttgtattttttagtttatattttatgatttttatatattatttattagtttattgtataagtttagaagaagaaaattattttgttttttattgtatagtttgaggatgtttttattttttttaaataatttatattttaaagttataatttttttttatttttgattataaattttttttattttgatatattttgtttttggt

SEQ ID NO: 262 - DNA, 7432 bp, Artificial Sequence
  chemically treated genomic DNA (Homo sapiens)
atttgaagttagagttatttagaggagaaagagttggaattgagaatttaaggaatgtttggaagtgattgggtttgagtttatttaggaagaaatagaggttggagatatgagattgtgttgttatttttttttattaatttttgggttttattgaggttttattataagtttggttttgtagtttagtgattaggagaaattagatataagataataataatagtaatgattttttttttttttttgagatggagttttgtttttttgtttaggttggattgtagtggtgtgattttggtttaatgtaagttttattttttaggtttatgttatttttttgttttagttttttgagtagttaggattataggtgtttgttattatgtttggttaattttttatatttttagtagagatggggttttattgtgttagttaagatggttttaattttttgattttgtgatttgtttgttttggttttttaaagtgttggggttataggtatgagttattgtgtttggttaatagtaatgatttttgagtatttatattgttagtttttatggtaagagttttttttattttttgttttgttttgttttaagatagagttttgttttgttatttaggttggagtgtagtggtgtgattgtggtttattgtagtttttattttttgggtttaagttatttttttgttttagttttttaagtagttgggattataggtatgtattattatttttggttaatttttgtatttttagtagggatagggttttttattatgttggttaggttggttttaaatttttggttttatatgatttgtttattttggttttttaaagtgttgggattataggtgtgagttattgtgtttttttttgtatttgtttaagtaatatattgaaatatgtattgtgttttttattttatggaggaggaaattgaggttagtaaatgaggttgttatgggaggtggagataggatttgaatttgttttagtgtaggaggtttaagagtttttgtttttttttagggtattgtgtgggagggtgagaaggagggaggtttatagaggtatgatttttgattgttattgttatttgggttttgttttttgaagtttttgttaagtggggaggtggttgggggagggttttgttttgtgtagtttttttttttttggtttgtagagttgagtatagagggatagaggtatggaatttttagaaatgtttttttttagaaataggttttaggttttgtttgttttgtgtttttgtgtgttggttttggtttgtattgggggtgagaagaagtgggtggagggatgtggggtttatatttggtgggtgtgagtgtggttgtgtgttttgtggttttgtagttatgtgagatatgagtatggagtgtgtgtgttttatggtgtgtgtatgtatgtgtgtgttggggagtgtgtgtgttggtggttgagagtgaagtgtgaatgttatattggtataaattgggattatttgtgtgtgtgtatgtgtgtgtgtggaagtgggagtatgtagttgtggtaaaaaagtgtatgtttgtgtgtatatgtgtatttgtgtgtatttgtttttttgtggggtatgtgtgtgtaaaatatttgagtgtgtggatatgtgtgagggggtgagtgtgtgttggtgtgtatgtttgtgttttgtatatgtatttttttttttttttttgagatggagttttattttgttatttaggttggagtgtagtggtagtagtggtgtgattttggtttattgtattatttgtttatttgttttaagggatttttttgttttagtttttagagtatttgggattatagatatatgttattatgtttggttattttttttttttgagatggagttttgttttgttatttaggttggagtgtagtggtgtgattttggtttattgtaatgtttgttttttgggtttatgttatttttttgttttagttttttgagtagttgggattataggagtttattattatgtttggttaattttttgtatttttattagagatggggttttgttgtgttagttaggatggtttttatattttgattttgtgatttgtttgttttggttttttaaagtgttaggattataggtgtgagttattgtgtttggttaatgtttggttaatttttttatatttttggtagagatagggttttgttatgttgtttaggttggttttgaaattttgattttaggtgatttgtttgttttggttttttaaagtgttgggattataggtatgagttattatgtttggttatgtattttatgttaaaatgggattatattttagattagtattatttagtagaaatttaaatttttaatatagggttaggtatggtggtttatgtttgtaattttagtatttttggaggttgaggtgggtggattgtaaggttaggagatttgagattattttggttaatagatgggtaaaaatttatttttattaaaaatataaaaaattagttatgtatggtggtatgtgtttgtagttttagttatttgggaggttgaggttggagaattatttgaatttgggaggtagaggttgtagtgagttgagattgtgttattgtattttaatttgggtgatagagtgagattttgtttgaaaaaaaaaaaaaatttaatatgtatgtagataatgtgtaaggtattattttatgtgtattgtatgtagtaatttttaatttttatgataattttgaggtagatattattattttgttttataaaaggagaaatagttttggggagataggataagttattggttaaggtatatagttagttatatgtggtttttgtgtgatggttggtttttgtaggtgaggttttgtttagatgtgtgggtagaaggtttggtttggaaagaggaattgatagtaaggttaagttaatgtttgtttttgggggtagaaagttattttttgttttttttttattgtttatagaggtagtttagatagggtgggggttataggagaatgaagggagaagggggtagtttttgggtagtaaaattaggtggtgaagggaggtattagaggatggtaattagagaggttattagaggggaattataggtagatagggtgataggagggattattgatataaggtgaagagatggtttagttggatggggtggtttatatttgtaattttagtattttgggagtttgaggtgggtggattatttgaggttaggagtttgaggttttaatatggtaaaattttattttttttaaaaatataaaaattagttgggtatgatggtagatgtttgtaatttttgttatttgggaggttgaggtaggaaaattgtttgaatttaggaggtggaggttgtaatgagatgagattatgatattgtattttattttgggtaatagagtaagagattgattttgttttataaaaaaaaagaaaaaagaaaaaaaaaaagagatggttgatggttaaagaggggttagtggttaggggatatataagggtaaaggtaggaggtaagaggattggtagggggttgtttttgggttattgggagtgatataggatgagtatggagggaaagggagaaggggattttagggttttagtttatttaagttgttttttggttttatttagtatgttagttagaggtttaggaaggaattttgagttttttattaaagttaaagatgagttgttggagtttggtgaggggtaggatgaaggagttgttggagatagtggtgaataggattagagatgggtggtaatggttttggtgagggtgtgttgggttgggtggtgggaggggatttttgggtttgagggaggaggggttggggtttggatttttgagttttagggaggaggaaagggtgggagtggggttgtgatttttaggtttgggaggagtggagggttagagttgagagtaggaatttttaggttatagagaggagtggataaatggggtagagaatatttggggagagttggggtttttattgtgatgtttttttttttgtaggagtttgagtattttttggggttttatgtagatttattatgatgattatttgagggatttgggtttgtttattaaggtttggttttttgaatttaaagatagttttttgaagaagatttatagtttgtgttttaggtttgtttgtggggataaggattagggttaaaatgtttataaaagttaggtgtggttgtggtgggtgtttgtagttttagttatttaggaggttgaggtaggatgatggtttgagtttaggagtttgagattagtttgggtaatatagtgagattttttgggggtaaaataaaaagaaaaaaaaaagtttatatttttttaataaataaagttttatttgtgtttttgtttggatttttttttagtgtggttagaaaaaaatttattttattgttttttaggaattaatgagtagaagaggtgatatttgatggggaaggaagagtagggaggttgggaagggtattaaggaataatattttattgtgggtttgtggagaatgggggattttaaggtgtgttagttttaggagggtgagggtaggagtgtgggtggagttagtaggtttttatgatggtttttattgagagttttgtttttgttttttataagttttgattttatttttagtgggtatttagtatttttaatttttttatagtttttaatttagtttttgttggaggtgaatttttagagtgagggttttttgttatttgagagaaggttttttgtgatgtgattttgggggatgttattgttttttttgtttttatttattttttttgtagttttgttggttaggattttggtttagataaaggatgggggttgtggttgtggagtggaagtgggttttaattattataaattttttttgtgtttgtttggagttggtgaggatagtttgttagagtttggtaagaaagggatttagggtgtggggataggggggtgttagtagggagagggtaaagattgataaagtaggaattttaagaggtataatattagaagtttgtgttggaattatgattgtgtgtgtgtgtgtgtgtgtgtgtgtgtgtgtgtgtgtgtgtgagagagagagagagggagatggagttttgttatgtagtttaggttagatttaaatttttgggtttaagtaatttttttgttttagtttttttagtagttgggattataggtgtattattatattttataaattatagaatttagaattgtagattatttgagtttttgtttagagttagggtggttgaggtggggaggattttttgagtttaggagtttgaggatgtagtgagttgtgattttgttattgtgttttagtttgggtgatagagaaattttatttttaaaaaagagaaagaaaaagggataggtataatggtttatgtttgtaattttagtattttgggaggttgaggtgggtggattatttgaggttaggagtttgatattagttttattagtatggtgaaattgtatttatattaaaaatataaaaattggttgggtgtggtagtatatgtttgtaattttagttattttagaggttgagataggagaattgtttgaatttaggaagtggaggttgtagtgagtttagattgtgttattgtattttagtttgggtgatagagtaagatttagttttggtggaaaaaaagaatgaaaaaatttaaaaaattaaaaaagaattgtaggttgggtgtggtggtttatatttgtaatttaaatgttttgggaggttaaggtaaatggattatttgatgttaggagttggagattagtttggttaatatggtgaaattttgtttttattaaaaatataaaaattagataggtatggtggtgtatgtttgtatttttagttatttaggaggttgaggtaggagaattgtttgaatttggaagatagaggttgtggtgagttaaaattgtgttattgtattttagtttgggtgagagaataagattttgttttggaaaaaaaaaaagaattgtagattatttgtttgtgttttttttttggggattagattttattttttttttgttgtatttttttattttttatgtgtggatgatgatattgtgttttgtgtatgttttttgttattaaaagtgttttttttatagagtaggtgagaatttagtgaggagatgtagggatatgaggtttgatttagggtagagttttaaggtaatatatttgatttattgtaggtttttaatggtgtttgtagagtatttttttgtattgatttagttttagtaaagggtagaggttttgttgtgttttttgttgggtttagaattgtttaggtgtttaagaaagttttttaggttgggtttagtggtttatatttgtatttttagtattttggggaggttgagatgggaggattgtttgagtttaggagttttagattagtttgggtaataaaataagttttttatttttataaaagaataaaaattagtagttgggtatggtggtttatgtttgtaattttagtattttgggaggttaaggtaggtaaattatttgaggttaggagtttaagattagtttggttaatatggtgaaattttatttttattaaaaatataaaaattaggtggggtatagtggtttaagtttgtaattttagtattttgggaggttaaggtgggtggattatgaggttagaagtttgagattagtttggttagtatggtgaaattttatttttattaaaaatataaaatattagttgggtatggtggtaggtgtttgtgattttagttttttgggaggttgaggtagaagaattgttagaattttggaggtagaggttgtagtgagttgagaatatgttattgtattttagtttgggtgatagagtgagattttattttaaaaaatatgaaaataaaaattagttgggtggtggtgggtgtttgtaattttagttattggggaggttgaggtaggagaattgtttgaatttgggaggtgggggttgtagtgagttaagattgtattattgtattttagtttgggtaatagagtgagattttattttaaaaaagaaaaaaataataattaaaatgttaaaattaggagtagaattatagaatgttggaaagtgaggtttaagaagggggttgtgtttaagtttatgtatgggaaatttgattgggatattgagtttatatagagtaggattttagttttttttattagagtggggtgtgattataggaatagttgtttttagttagtttgttatatgatatttttttaatgttttagg

SEQ ID NO: 263 - DNA, 7432 bp, Artificial Sequence
  chemically treated genomic DNA (Homo sapiens)
tttggaatattgagggggtgttatgtggtaggttgattggaggtggttgtttttgtggttatgttttattttggtgggggggattgagattttgttttgtgtgagtttggtgttttagttaagttttttatgtatggatttggatatagttttttttttgggttttattttttaatattttgtgattttatttttgattttaatattttaattattattttttttttttttgagatggaattttattttgttgtttaggttggagtgtagtggtgtaattttggtttattgtaatttttattttttaggtttaagtaatttttttgttttagtttttttagtagttgggattataggtatttgttattatttggttgatttttgtttttgtattttttgagatggagttttgttttgttatttaggttggagtgtagtggtgtgtttttggtttattgtaatttttgtttttagggttttagtaatttttttgttttagttttttaaggagttggaattataagtatttgttattatgtttggttaatattttgtatttttagtagagatggggttttattatgttggttaggttggttttgaatttttgattttgtgatttgtttattttggttttttaaagtgttaggattataggtttgagttattgtgttttatttgatttttgtatttttagtagagatggggttttattatgttggttaggttggttttgaatttttaattttaagtgatttgtttgttttggttttttaaagtgttggaattataggtatgagttattatgtttagttgttaatttttatttttttgtagagatgggagatttgttttgttgtttaggttggtttggaatttttgggtttaagtgatttttttattttggtttttttagggtgttgggagtataggtgtgagttattgagtttagtttagaaggtttttttgagtatttaaatagttttgggtttagtagggaatatagtaaagtttttgttttttgttaaggttgagttagtgtagggaggtgttttgtagatattattaaggatttatagtagattaaatgtgttattttagggttttgttttaagttagattttatgtttttgtatttttttattgagtttttatttgttttatgagagaggtatttttggtgatgaagaatatgtatagggtataatattattatttatatgtaggagatgaggaagtatggtagaaagagggtgagatttgatttttggagaaagaatataagtaaatggtttataattttttttttttttttaagataaggttttgtttttttgtttaggttggagtgtgatggtgtaattttggtttattgtaatttttgttttttgggtttgagtgatttttttgttttagttttttgagtaattggaaatataagtatgtattattatgtttgtttaatttttgtatttttagtagagatggggttttattatgttggttaggttggtttttaatttttgatattaagtgatttgtttgttttggttttttaaagtgtttggattataagtgtaagttattatgtttagtttatagtttttttttagttttttaaatttttttattttttttttttgttaagattgagttttgttttgttatttaggttagagtatagtggtatgatttgggtttattgtaatttttgttttttgggtttaagtaatttttttgttttagtttttggaatagttgggattataggtatatgttattatatttggttaatttttgtatttttagtatagatgtggttttattatgttggtaaggttggtgttgaatttttgattttaagtgatttatttgttttggttttttagagtgttgggattataggtatgagttattgtatttattttttttttttttttttttttagaaatggggtttttttgttatttaggttggaatatggtggtaagattatagtttattgtatttttaaatttttgggtttaagggattttttttattttagttattttaattttaagtagaagtttaaatagtttatagttttaaattttgtgatttgtggagtgtggtggtgtatttgtagttttagttattggggaggttgaggtaggaggattgtttgagtttaggagtttgagtttagtttgggttatatagtgagattttattttttttttttttttttttatatatatatatatatatatatatatatatatatatatatatagttatggttttaatatgggtttttaatattgtgttttttaaaatttttgttttattgatttttgttttttttttgttgatgtttttttgtttttgtattttgagttttttttttattagattttggtaggttgtttttattagttttggatgggtatagagaggatttatagtggttgagatttatttttgttttatagttataatttttattttttgtttaggttaaagttttggttaatagaattgtggagggggtgggtggggatagaaagggtaatgatgttttttaaggttatgttatagggaatttttttttaagtgatagggaatttttattttgagaatttgtttttgatagaggttgggttgggggttgtggaggggttggaggtgttgggtgtttattgggaatggagttagagtttgtaggagataagggtgaagtttttagtgagggttattatggggatttgttgattttatttatgtttttgtttttatttttttgaaattgatatgttttgaagttttttattttttgtaagtttataatagggtgttattttttgatattttttttgatttttttatttttttttttttattaggtgttattttttttatttattgatttttgggaggtagtggggtgggtttttttttggttatattggggaaggatttagatagggatataggtgagattttatttattggagaagtatgaatttttttttttttttttgttttatttttaagagattttgttgtgttgtttaggttggttttgaatttttgggtttaagttattattttattttagttttttgagtagttgggattataggtatttgttataattatatttggtttttatgaatattttaattttggtttttgtttttatagataagtttggggtataggttgtgggttttttttaagaggttgtttttggatttgaggaattaggttttggtgagtggatttaggttttttaggtggttgttatagtaggtttgtatgaagttttggaaggtgtttgggtttttataggagagaggatattatagtggaggttttagttttttttaggtgttttttgttttatttatttgtttttttttgtgatttaggagtttttgtttttagttttaattttttattttttttagatttaggggttatagttttatttttattttttttttttttttgagatttaggggtttaggttttagtttttttttttttagatttaggagtttttttttattatttagtttagtatatttttattagaattattgttatttgtttttggttttgtttattattgtttttagtagtttttttattttgttttttattaggttttagtgatttatttttagttttggtggggggtttagggtttttttttgggtttttggttggtatgttaggtggaattagagggtaatttgggtaggttgggattttagaatttttttttttttttttttttatgtttattttgtgttgtttttggtggtttaggggtagttttttgttagtttttttgttttttgtttttatttttatgtgttttttgattgttaatttttttttaattattagttattttttttttttttttttttttttttttttttatgagatagagttagttttttgttttgttgtttagggtggagtgtagtgttatgattttgttttattgtaatttttattttttggatttaggtaatttttttgttttagttttttgagtagtagggattataggtatttgttattatgtttggttaatttttgtatttttagaagagatggggttttgttatgttggggttttgaatttttgattttaagtgatttatttattttgggtttttaaaatgttgggattatagatgtgagttattttgtttggttgggttatttttttattttgtgttagtagttttttttgttattttgtttgtttgtggtttttttttaatggtttttttaattgttattttttgatgtttttttttattatttgattttgttgtttaggaattatttttttttttttttgtttttttgtgatttttattttgtttgagttatttttgtggatagtggagggagagtaggaggtgattttttgtttttaggggtagatattggtttagttttgttgttagtttttttttttgggttagattttttatttatgtatttggataaagttttgtttatagagattagttgttatgtgggggttatatgtagttagttgtgtgttttggttggtgatttattttgtttttttaggattgtttttttttttgtagaatggggtaataatatttattttagggttattgtgagaattaagagttattatatatgatgtatatggaatggtgttttgtatattgtttatatatgtgttaaatttttttttttttttagatggagttttgttttgttatttaggttggaatgtagtggtgtgattttggtttattgtaatttttgttttttgggtttaagtgattttttggttttagttttttgagtagttgggattataggtgtatgttattatgtatggttaattttttgtatttttagtagagatgggtttttatttatttgttagttaggatgattttaaattttttgattttgtgatttatttgttttggtttttgaaagtgttgggattataggtatgagttattgtgtttggttttgtattaaaaatttaaatttttattggataatgttgatttagaatatgattttattttaatataaagtatatggttgggtgtggtggtttatgtttgtaattttagtattttgggaggttaaggtgggtggattatttgaggttaggattttaagattagtttgggtaatatggtaaaattttgtttttattaaaaatataaaaaaattagttaggtattggttaggtgtagtggtttatgtttataattttagtattttggaaggttgaggtaggtggattatgaggttaggatatggagattattttggttaatatggtgaaattttgtttttagtaaaaatataaaaaattagttaggtgtggtggtgggtttttgtagttttagttatttgggaggttgaggtaggagaatggtgtgaatttgggaggtggatgttgtagtgagttaagattatgttattgtattttagtttgggtaatagagtgagattttgttttaaaaaaaaaaaatagttaggtatggtggtgtgtgtttgtagttttaaatattttgaagattgaggtaggagaattttttgaaatgggtaggtggatgatgtagtgagttaagattgtattattgttattattgtattttagtttgggtgatagagtgagattttgttttaaaaaaaaaaaaaaaaatgtatatgtaaaatatagatgtatatattagtatatatttatttttttatatatgtttatatatttaaatattttgtatatatatattttatagagagataggtgtatataaatatatatatgtatatagatatgtatttttttattatgattgtatatttttatttttatgtatgtatgtgtatatatatagatgattttagtttgtattaatgtgatatttatattttatttttagttattgatatatatattttttgatatgtatatgtatatgtatgttatgaaatgtatatattttgtatttatgttttatgtggttatagagttataggatatatagttatatttatatttattaggtgtgggttttatatttttttatttatttttttttatttttaatgtaggttaggattagtatgtagaggtatagggtaggtagggtttggagtttgtttttgaggagggatatttttgggggttttgtgtttttgtttttttgtgtttaattttgtgggttgggggaggggaggttgtatagagtagggtttttttttggttatttttttgtttggtagagattttagagagtagggtttaggtgatagtggtaattagaggttatgtttttgtgggttttttttttttttatttttttatatagtgttttgagagaagatagaggtttttgagttttttgtattgaggtaggtttaaattttgtttttattttttatgatagttttatttgttggttttagtttttttttttataaagtgggaggtatagtatatattttagtatattatttgaataaatataaagaaaggtgtagtggtttatgtttgtaattttagtattttgggaggttgaggtgggtagattatatgaggttaggagtttgagattaatttggttaatatggtgaaaaattttgtttttattaaaaatataaaaattagttagaagtagtgatgtgtgtttgtaattttagttatttgggaggttgaggtaggagaatggtttgaatttgggaagtgaaggttgtagtgagttgtgattatattattgtattttagtttgggtgatagagtaagattttgttttgaaataaaataaaataaaaaatgaagaaagtttttattgtggagattggtaatataggtgtttaaagattattgttgttggttaggtgtggtggtttatgtttgtaattttaatattttgggaggttgaggtaggtggattatgaggttaggagattgagattattttggttaatatggtgaaattttatttttattaaaaatatgaaaaattagttaggtgtggtggtaggtgtttgtagttttagttatttgggaggttgaggtaggagaatggtgtgaatttgggaggtggagtttgtattgagttgagattgtgttattgtagtttagtttgggtgaaagagtaagattttgttttagaaaaaaaaaaaagattattgttgttattattattttgtgtttaattttttttagttattgggttgtagggttaggtttgtggtagggttttaatagggtttaagggttgatgagaggaaatagtaatatagttttatgtttttagtttttgtttttttttaggtgggtttgagtttgattatttttaagtattttttgagtttttaattttaatttttttttttttgggtgattttggttttagat

SEQ ID NO: 264 - DNA, 12423 bp, Artificial Sequence
  chemically treated genomic DNA (Homo sapiens)
tttatttgagttttttttgttgtagagaaagtttttttgtgattttatttttttttttaaatgttgggaaatgtttttgagttttgtttttgatatatatattttttttgggttgagggatggggattgggatatatgttttgggaagggtaggtgtagagtgatggggttgatggggtgggggaagtagggggaggagttgtttttttgaggtttttgggaattggttgtgttaggtatttttagttttttagttaagtaatatagagagttaaaagaggttattagagataagaaggtttttatggggttattgtttgtgggggatgttagtagtggggaggagtgaagtaggaaggaattgggagattggatggaattgttttttttatatggttatatatagttatatatggttattgggattagagttagttttgtttgggtagttaggtttttagtgtaagttattagtttatttggaggggattagtgttttggttaataaggttagttggtttttttttagttggagtttatttaattttgttaggaagttagagagttggataagtggagtttagtttggggaggtggaagagagggaggatggagtatggtgaagtataggtggtttttttggtagttttagttttggttttggaatagtttgggtagtgtgttaattttttttgttattgttgttttattgatttttatgaatgagttgtgaggtagttatttttagttttttatggataaatatttgaggtttagagagggtaagagatttgtttgtgattttttagtatttttgtttttttttggggttttgagggtataataaagatttttaaggttttttttttttgtaggaggtttaggtgtagttgtgggggagggtgtttttggtgttttttgtttttgtagttagtttgttttttatttggtagttttttttttttttttgggatgagatgtgtatgtgatgatgggattttgtaaatgggttgggaagaaggagttatttttttaaagggttagtttttttaggagtgtttgaatttttaaagggggtagggttttatataaattttatttagaagtaggattataagagtttttgtagtatttttttttttttgttggttttttttgagtgtgtattttgttttattagtggaatatttgtgggttagggttattggagatagggttatattgtttgggtggttatttaagtaattttattattttgagtattttttttttttatttgaaaggtggggggttatttatttagtttttagggttgttaaggtgattaaatgggataatggttgtattatttttgagtaaagggtattatagatgggaagattattttagttttgtagggagttagatgggttgtgagggaggggtaaaggtagggttggagggggttggaggggttggttgagtagggtatatatggggggggtttttttttaaatttagaaaaatttttagttaggtttagtgtttttgttgagaaattgaggtttaaagaaaggaattttttgtttttttgtttttttttttttgtttgaggttatttatttatttaataattttgtgtttgatattagataaggttttagtgagtaaaatgaatatagtttttttgggaatatagagtttagatagggagatgattattttattattgtaaatataaatatataattttagtttgggttaagtgttgtgaagttttagatttgtgtttggtttggtgttgtattttaagtattttggtatttaagtggtattgaaatatttgttggaaagaaggttattttgaggaggtgatgttagagttgaggtttggagggttggagttaaataaagatggttttaggttttttttgttttttttgtaggttttgtttttgttttttttttggtatttaggttaagggtaagtatttttgattggttattagttttaatatgttgagtatagggattagattttgttttgtgtggttggttttttttaggttttgaatttagggaagtgtatgtggattttaatttatttagatggtgtgtttgtgtttgttttttttttgggtatgttttagaatagagtttagtttagagtttaggggtggttgggatgatggatgagggtgtggggtttgttgattattaggggatttgattattgggttgggttagtttttttgtttttatttttttttttgtaaagaaggggtgttgggtgtttttattttttgtgttagttttggggtttttattttggtgggaagggtaggttgatttggtagattgtggttttttgggagggaagaaggtgttagatgtgtggagtaattataaatagttttttttttttagaagatggtatggggtttaagatttaggtgttgtatatttagaatgagagtagagatttttgttaggaaaaaaaggtatttaggggatttgtttattagtatgaaatgtaaatgagtttgtttggttttatttatataattttgtgtatggatttggtgaaagggtaattagggagatgatggtgtagtagttattttgttattttttttattttttttttttattggttggggtgggaattgagatgattttaattttttgtggtggtgggaggtgtgtgggggttgtgtgggtggtgtagttttaggagagtgaataatgtttaggggtgatggttttagtaaagtgaggggtggtgatggaggttatttgatttattttgttgtttttttgtagtggtgtaagtgttttaaaatttttggagagggaattgattgatttattaggttttgttgtgtttattttttgtagatgttggggaagtgttttttggtgtttaatttttgttgtttttttttttattggtgtttagtatatttgtggtgttttgtttttgggtatttatagttttttggagtggtgttggtggtaggagagagttagagttgattgagttttagaatttggggaggtaggtggggtaagggttggggtttgtgtgtgtgtgtgtatgtgtggaaagtataaatttatgagggtttgttgttggtagggttaaggtgagtgagtgaaggtggtagatttgtgaagttttagttttgtggatattttttttttaagttatatagggatttaagagaaattgaggtatgaagttggggggtggtggtggtggggattttgaaggttgagttgataaagtttagttttgtgtttttgtttttttttatatatttgagatttttataggtttttttttaggggtttttgttttgttttgtagttttttttggggatttgggttttgtggtttagtgtgatttgtttggggttatgtgtttaagtatgaagtttttgtgtggagtttatgttttttaaaaggtttttaggggtaaagggatgaagtttaggagtgttaatgtgaggttaggtttagtgggttagggttatgaggttagggttgaagttttagaattgatttgggagtatgattaataagtttaagagatttgtggaggttatgtttagattatgtttattttagttttttttgagttttgtttgtttttttaagattgggtttttttagtttgaagttttatttttaggatatttagttttgtttttttttttttttagttttgtagttaagtttaattttagggtgggagattaattaggtggagatttgggattttgttttgggattttttggtgataatttttatttttgtgttgtttgtttttttttttttttaggtttgtttagagttgagttttgttttttggttgttgtttaaattaggggttgtggataaaggatgtttggggtttgtggttttatgttaggattttgtgttgaatattttgattttttgggttttttttaagggagttttaaagattttaatggttaataggaaagtgggtttggtttgggtagtagtttgattggttttagtttttgggagtggatttaggggtaaggggaggggagaggggtggttttgggttttggggtgggaattggattttagttgtggttttttttttgtgtttttgtttgtattgttatggtggatggttaatgggtgtgtggtttggggttggtggtgtttggtgattggttgtggggttgtttgggggtggggttgaggtttgaagttgaagtgagggatttagttgtggtgtgtgtggggttttttgttgttgtttttgtttgtttgttttgtgttttggttggaggaggaggttgtggtgttggtgatagttatggtagtggtagttattgtggtggttgtggtggtggtatttttgtttttatttttgtttgggattgttttttattgtttttttgttttttttggatagtgagtttgtggtggggtgggggaaggagttgtttttattttttttaagtttatttttaaagagattttttttttttttttttgttgtttggtgtggagttgggatgatgttgattttttagatttggttttagttgtgttgtgggaagagggggtgtttttttttggatttttgttttttgttgttgtttttttttttgtttgtttttttggggtggttttgttgaaggtagtgttgaatttggtaattggagtttgggtgtgaagtgaagaagttggaataaagtgagggggagttggttggttggtttgggaagttttaggggtgtaggggaagtgggatttgtgttgggtggggtttttttgtgttttggtgttttgtgggtagtatgtttttgtgggtagggggagttgggttgaattggtttttttgggggtttagtttgtgttttagagtttattagatgtgtttttgttggggtttttgggttgtgtgaggatattttttttgaggggtgttgtttgtttttttttggattgtttggggttttggttggttagaggatggatgaggaggaggatggagtgggtgttgaggagttgggatagttttggagttttatgtggtttaatgatttgttgggggttgggggtggttggggttggggttagtagaaaaggatttgggtagtgtggattttgaggtggaggggttgttgtatttggtgttggttttggtggtttttttttatttgagttaggatagttgtttgtggagttggtgtttttgtatggtttgtaatttatattttttggggtatgatggttaggtgtggggttagaagggggatgggttgtattgttgggggttgggggggaagaagatttattgttaggtgagttgaagtgagtttggagggtaggtggatggggggggggttgttagggaggggagggggtattagagtgggagtggagatgtgagtaggttttgttggtaatttgggtttattttatttgtgtatatatattttagtttttttgggttgggggggtggggatttaggttaggagaagagagttgtgttttgttggtttgtagttggatgttttttagatgtggttaggggagggttgttattttttagatgtgggaagttttgggagtttgggagttgtattttgtttgtgttggttagtgagttgggtttggtttttgagtttggtggggggtgggtgggggtggtggggaggaagttgtggggatggaggaggggggattgtaattttttgggttttttttttttttttgttttaaagtttgtggtggattttagggtttgattttttaatttggtttttgaggttgaggtttttattgatttagaaggagatgttggggggtggggattaggttttggtttattttattttttattttgtgggttggaggtataataaggagattttggtggtggttgatgttaggggtgtagaatgagaataagatgtggtggaggggagttgtttgtttttggagttgggagtggagtttttttttgttagagtttagtgttgtgggtgttttttatttgatttttatttgatgtagggtgtttaagattgggttggggagttttatgttggattttttttgtggagggaaagattgtgttaagagtttttttagtaagtgggggatggggttaagttggtttaggttatttttttttttttataaataaagagtgtttttgtagattaggtatgggggattgtaggtttgtgaaagttttgaggggatagtaatattgttagtgtgtttattaaggaggatttgggtttattattttagtgtagattttgtagataggtttggggaatgtaagttttatattttagggagatggatttagtattgttttttgtttgtttaggttggagtggtaggggagattttagtttagttagattttagtttaaagtgttatttgatagatgtttggttttaagttttttggtgggttttgttattgggggaaggaaaggtggaggggaggtgttgttgttattttaggtttggatagtttttttgggttttttttttttagtttagaggtttttatagatttagggtgggagattttaggttttttttgtagtttttgtgagtttagtagggattttgttttggggaaggggggtggaaggttggtgttgtttttattttttgtagttttgttgtttttagtgtgtaaagtagggatgagtttgtggtttttttatttttattttttatattttgtgggtttttaggaagttttttttattatattttttttttatttattgttttttttttttttttttttgagttgtagaaagagaggtgtaggttttagaggtttgtgtttttgttgaataggtataattttgaggtttgagtttttagttttaggttttttttttttaggtagggatggagatggagaattgatatggttggaaaggatgggttttgagtaatttttttttttgtttttaattatttattttttttatgaatgggaaaaagtattaatttttatgtttttttttttaagggttttaggggaggtagagagagttttttttttttttttttttgaaaatagatttttaggttagtatttttttttgtttgttttatttttaggtgttagtggagggtttggaggtagatttttttattgagtggtttggatgggggtaagtgttgaggtttggtatgggggaggagaggtgggaggatagtatttattttgggagttggggagtagttttttttaggggagtggtagttgggtgtgtggtattagtattattaggtttggagaagtttgggttggttgaggatgggttgagaataattttttggtaggggattgtttaagttgtgttttttattattgttattttatttaagtattaagagatatttgtatttttgttgttagaggggttttgaattgtttttagggtttttttttttttttttgtggtatttgtgattttttataggttttaggagggtttttgtatgtttttgagttggagggatataaggatatttttttttatttttaattaattgaagttagttaggttttttttggtatattttgttttttggttttttttttttaagggattaggttttttagagaggagatttagatttaggtaggaagtgtgtgtgtgtgtgtgtgtgtgtgtgtgtgtgtgtgtgtgtgtgtgtgttgtaagggaggatagtaaaaggtttagaagtgtaagttttggtgtggagagtaggggtattggtagatagttatttttgttttagattagaggggagtatgttggtttttttagtatgtgtttttgtaagtgtgagggagtgtgttttttttttggggaggagtttttttgtattttttttttggttgttgtgttatatttggaagtttgtgtaggagtttttttaagtttagagtttagtatagtttttttttatttggaaattataggttggtatttgggatgttgagagagggggagtgggaggggggttagagggggaagaggggagtttgttaggagttgggggaggagaggggggggaggtttgaatggtaggagttttaatggtttttagaagtgagtgtgagtgagtgattgtgtgttattttgtgtgtttgagtgtgtttttttagaggggtgggggtataggagtttttggagttttttttgttatattgttttaatgttttaagtttgtttattttttttatttagggagaattttttatttttgtttttagaggaaatggtggggggagtgttttttttgtttttttattaatttttttttttaatttaatttttaaattttaagtttattagaggagattttggggagaagggttggggttggagaattgaatgggattgagggggggttagattattttttggtatgttttttgttttaggtttattttttttttgggttatatatatatttttttttatttgttttgttttattgttttgttgggggattttttattatttgtagtgttagttggagttatttttgggattatttttattatatagttttttttatttttgtttgtttttgtttagtatttattttgttttgtttgttttagttaggatggtgatagatataattgtttatatgtagatatgtgtatgtgtgtgtatatatatatgtatatatatatatagagttatagatgtttgaattagatttttggtttatttttttttttaaagattttagtgggttgttttttttgtgtttttgtgttttatgtttttgtttttgggtggagttggttgtttttttgtgagttttagtttttaatttagttggaagtttttttttttttatatttatgtattgaagtgtggtgaggggggaattatagggaaataggtttgtggggtgaggggggggggttttgttgggggaatttttttttgagttttggagtagggtggagtttttatattttatgttattttaggggttgttgaatttgatagatattaggagtttttttgtgggatgggtgaggtaaggatttatttttttatttttttatttattagaaggttaggatttttgggtttaggtttattttttttttaatgttttttagttttatatttttaggtttttaggtgggaatggggttgttggagggtttgtttgtttttttagtttatgtttagagtttttgtgtttttagaggtgttttagttattttttttttttttttattttttttatttttgtggttgttaggttaagtaagggttttatttagataaagttttatatagaggatttatttgtggagataatatgttttagtttttttttttaggagggaggaaaggaggagggatggaagtggggtttttttttttgttgttttttttttttttgtttttgatggtgggttgtggggagaagaaagattttttttttttttattttttttttgggatttattttagtttggatagttattatagtaatagtagatatgtgattgtataggttttttatagttattatggtaattagtgttttttgtttttttggttattatggggatttgttatatggtttttttttaatttgataatttgtgggtttttttgattttttttttttgtataaggataagataatagttttagttaggggagattatgtgagaggggtttttttaattattatgataataaatttatattatttggtgatatatttttttgttgttatggtaatagaagaatattatatagtgatatattgttatgtttttaaggaaataagttttattttgagaagggtgaaagatttttttttttattaattatttttttatttagagtgttttaaattgttgtgtgttttggttttttttttgtttgtttatgtttatgtgttgtggaaggagagttgtatagggtgggtaggatgttatttggaagtaggttgaattgttaagggatttttaagaaggggttgatatgattaagagttgtgtatgaggttatttgggggtaggttttgtttgtaagaggtttttagtttgagtttgggtaaggtggggatagaaagaggggtaatttttttgtgaggttatttttgtatttttttttagttataagtagtttatttttgttaagggaaataaggtaggaagatttgaatggggatatatatttggtttttaggtagggagatttattgattggttgatttgtttatttatttatttagtttttttaggtattgattatttgttttgtgttaggtattatagtaagttttgtaggggatttaaagatgtattagaatgtttttgtttgttaggagttttagtttagtaggggaggttgataagtgtatagattattaatatggtggaattttgttattagaggggtttaagtagatgttttgggagttttttttttttagagatttattgtttttatatagagatatttatttattggggttttttttagatttttttttttttgtagaggagaggaggggatttgtatggggaaagtagattagtttttgagggtaattgtgtttttttttttttaaatgatggttttttttttgtttttttttttttagggtgatttttggttgaattttattttggggagagatttattgtattttggttttatttagaaaaataattttatggaaatagagtattttttattttttttttgttatttgtttatttttaaaaatttagaattttttttttaaatttttttatttttgtgagggggtgggggttagggaaattgtagtgtattaggatttttggggtattatggataggtggtgagtaggtatgtgagtttaggggagaagggtttgggtggtggagaagagataggggagggttgttaggggtttgagggatttatgggttatgggggagggtatgtggtttgggagttagaatagagatgggttatggttgggattagttgggaggaaggtttataggtttttgaatatttttgttggtttttttatgtttggttaaagtttttttattttagaagtaagattttatttgttttgggttttatagagtttggtttggtgggttatgttaggagttgttataatattttttttatttttattttttagggggtttttggttttttttttttaattttttgttttttgattttttttagtttttttatttttttttattttttttatattttttttaaagaaaataggatatttggttatttaattgtgagtttagtgtttggaattttttaaggtttggaggttgttttgtatatttttttgttgatgggttggaaatgagttattttatagaatttattgtatggaaagatttagggtttagaaagaattttttttttttgtttgttgttttggttggtttgggttggaagttataagtaggtgtgatggtggtaatggttttttgggggagggggtagatattgtttattttgtatggtttgggagttatgtttagtatggtgtttgatatataatgggtttttaatatttaaatgtgtgaatatgtttagtggttatttgagggtgttgagaggttgggaggttggtggtggaagagggagttttgggttttggtgttgtagtaggggggattgtagttgtggatgtttgttttatatttagtgttagggtggttatgataggtagttttgtttgtttgagtagttatggtgtgtagaggaaattattatatattaggagtttggaaattattgttttattttgtttttttgggtgatttttagtatatgattttggtatttttgggttttaatttttttgagttttggggaagaaaatgatttattttagatattttatagggttgttgtgagtattaattgtggtattgtgtgaaagtgtttggtaaattgtaaggtaggtataatttgattttaggtttgtataatatatttatatatagtattttatttgttttttatatttattttgtgaggtagggagaataggatttagattttgtagtaaatttatggtgtttggtatttttataggtatgattgatttattttttaaatggtttgtgtaaatagttagggtatttgtggtttgtttttttttatagatgaggaagttgggtttagagaggtgagatgattaaggtgggattttttttttttgatgaggagtttggggttgggggttggtttgtgtgtatgttagggttttggtattatatttgtttagttttagatggagttaggaggtaaatgaggaggaggtgttagggtggggttggggggttggttttagttttagttttggttagttgtttttttgattgttagtatt

SEQ ID NO: 265 - DNA, 12423 bp, Artificial Sequence
  chemically treated genomic DNA (Homo sapiens)
ggtattggtagttaaggaaatagttggttaaggttggagttgaggttggttttttgattttgttttaatattttttttttgtttattttttggttttatttgaggttaagtaggtgtggtgttagggttttgatatatatgtagattagtttttagttttagattttttattagagaaggggagttttattttggttattttatttttttggatttagtttttttatttgtaaaggaagataagttataaatattttgattatttgtataagttatttggggaataaattgattatgtttgtggaaatgttagatattatgagtttgttgtagaatttgaattttattttttttattttatagggtagatgtgagaagtaaatgagatattgtatgtgaatgtgttatataaatttaaagttggattatgtttgttttatagtttattaagtatttttatataatgttatagttgatgtttataatagttttgtgaaatatttggggtagattatttttttttttagaatttgaggaagttgaggtttagaaatgttgaagttatgtgttgaaggttatttgagaaggtaggatgagatggtggtttttaagtttttgatatatgatagttttttttgtatattatagttgtttaggtaggtagaattgtttgttatgattgttttggtattaggtgtaaggtagatgtttatagttgtagttttttttgttatagtattagagtttggggtttttttttttattattagttttttaattttttaatatttttaaatgattattaggtatatttatatatttaaatattgaggatttattatgtgttaggtattatgttgggtatagtttttaagttgtgtagagtggataatgtttatttttttttttaagaggttattgttgttattatatttgtttgtggtttttagtttagattagttaaaatagtaagtaggagagaggggttttttttaaattttgggtttttttatatagtggattttatggagtgatttatttttagtttattagtaggagaatgtataaaatggtttttggattttagaaggttttaggtattggatttatggttaaatgattaagtattttattttttttaaggaaaatatgagaagggtggggaagagtaaagaggttagaaaagattagagagtaggagattggggaaaggagattagagattttttggggaatggggatgggggaggtattgtggtagtttttggtatgatttattaagttagattttgtagggtttagagtaggtggaattttgtttttggaatgagaaggttttggttaggtatgaagaggttagtaggaatgtttaggaatttatggattttttttttagttggttttagttatagtttatttttgttttgatttttaagttatatgtttttttttatagtttatgaattttttaaatttttgatagtttttttttgttttttttttattatttaggttttttttttttagatttatatgtttgtttgttatttgtttgtggtattttgagagttttaatgtattgtagtttttttaatttttatttttttataagaataagagggtttaagaaaaaagttttaggtttttgggggtaggtagatgatagggaggaaataaaaagtgttttgtttttatggaattgtttttttgagtagagttggagtgtagtggatttttttttagaatggggtttagttaggggttattttggaaaaagggggataggaagggagttattatttggaaagggaaagatatagttatttttaagaattggtttgttttttttatgtaggttttttttttttttttgtagggaaaggggggtttggaaggagttttagtgagtgaatgtttttgtgtggaggtagtagatttttgaggaagaggggtttttaggatatttgtttggatttttttaatggtagagttttattgtgttagtaatttgtgtatttgttgattttttttgttgagttggggtttttgataggtaggggtattttgatatgtttttagattttttatggagtttgttgtagtgtttggtatggagtagatgattaatatttgggaagattgaatgaatgaatgaatgaattaattaattaataagtttttttgtttagaagttagatgtgtgtttttatttaggtttttttgttttgttttttttgatagaggtgaattgtttataattgggggaaggtatagaagtgattttatagaggagttgtttttttttttgtttttattttatttaggtttagattggaggttttttataggtaaagtttgtttttgaataattttatgtatagtttttgattatgttagtttttttttaagggttttttggtaatttagtttgtttttaagtaatattttgtttattttgtatagttttttttttatgatatgtaagtataaatggatagggaagagattaaggtatatgataatttgggatattttgaatagaggaataattaatgggggggggggttttttattttttttagagtagggtttgtttttttgggaatatggtagtatgttattgtgtgatgtttttttgttgttataatgataggaggatgtgttattaggtggtgtggatttgttgttatggtaattaaaaagattttttttatatgattttttttgattgaggttgttgttttgtttttatgtaggggaggagaattagggagatttataggttattaggttgggggaaaattatgtgatagatttttatggtaattaagggaatgggggatattggttgttatagtgattatgagagatttgtgtagttatatgtttattgttgttatggtgattgtttgggttggagtggattttaaagagggggtaggagaggggaggattttttttttttttataatttattattaaaagtagagaaaaaggaaatggtagagagaggaattttatttttatttttttttttttttttttttttgggagagagaattagagtatgttatttttataaatgagttttttgtgtggggttttatttagatagagtttttgtttagtttggtagttgtaagggtgaggaaagtagggagaggaggggggtggttgggatatttttaggggtataggggttttgggtatgggttgagaaggtaagtaggttttttagtggttttatttttatttaggagtttggaaatgtgagattaaggaatgttgaggagaaaatgggtttggatttaggagttttggttttttagtaaatgaggaggtagggggataggtttttgttttatttattttatagagaggtttttggtgtttattggatttggtaatttttagggtaatatgggatgtaggggttttgttttgttttaaagtttaaagggggatttttttagtagaattttttttttttattttataagtttatttttttgtggttttttttttattatgttttagtgtatgggtgtagggggagagaggtttttagttgaattgaaaattgaagtttatagaaaggtagttggttttatttagagatagagatatgagatatagagatataagagagatggtttgttggaatttttggaaggggaaataggttagaaatttgatttaaatgtttgtgattttgtgtgtgtgtgtgtgtgtgtgtgtgtgtgtgtgtgtgtatgtttgtgtgtgagtagttgtgtttgttgttattttggttgaggtaggtagggtggggtgagtgttgggtgggagtaggtgagggtggggggggttgtgtggtgggggtaattttaggaatggttttaattggtattatgggtgatggggagttttttagtagagtggtggagtagagtgggtgggaaggaatgtgtgtgtgatttagaaggaaagtgggtttggggtagaaagtatgttaaggggtgatttggtttttttttaattttatttaattttttagttttagtttttttttttagaattttttttggtgagtttagggtttggaaattaaattggaggagggaattgatgaagagataggaagaatattttttttattattttttttgaggatagaaatggagaattttttttaggtaagagaaataggtagatttggggtattgggatagtgtggtaaggaaggttttagaaatttttgtgtttttatttttttagagggatatatttagatatatagagtgatgtatagttatttatttatatttatttttggaagttattagggtttttgttgtttaggttttttttttttttttttttttgatttttggtaggttttttttttttttttttggttttttttttatttttttttttttggtattttaaatgttagtttgtgatttttaaatgagaaaaagttgtgttgggttttgagtttggagaaatttttatataaatttttagatgtgatataatagttagagagggaatgtggaggaatttttttttgagaggggagtgtgtttttttatatttgtaggaatatatattggaaaggttagtatgtttttttttgatttgaggtaggggtgattgtttgttagtatttttgttttttatattaaagtttgtatttttgagttttttgttgtttttttttgtaatatatatatatatatatatatatatatatatatatatatatatatatattttttatttgggtttagattttttttttaggaaatttggttttttaaaaaggagaggttaagaagtagaatgtattaagaaaagtttaattagttttagttagttgggggtggaggggagtgtttttatgtttttttggtttagaggtgtatagggatttttttgaagtttgtggggagttatagatattataaagagaaagagggaggttttggaggtagtttagagtttttttggtagtaaaaatataggtgttttttggtatttgggtaggatggtagtggtgaggggtatagtttaggtagttttttgttaaaaaattgtttttaatttatttttagttaatttaggtttttttagatttagtaatgttgatgttatatatttaattattatttttttgggggaagttgttttttaatttttaaggtgagtgttgtttttttatttttttttttttatgttaggttttaatatttgtttttgtttagattatttagtgaaggagtttgtttttagattttttattagtatttggagatagggtaggtgagaagagatgttagtttagaggtttgtttttagggagaggggagagaagagttttttttattttttttgggatttttgagaaggaggatatagaggttgatgtttttttttatttgtggaaggggtaaatgattaggggtagagaggagagttgtttggaatttattttttttagttatattagttttttatttttatttttgtttgggagaaaggggtttggggttgggggtttaaattttaagattgtgtttatttagtaagaatatagatttttgaggtttgtatttttttttttgtagtttagagagaaaggaagaaggggtagtggatgagaagaggatgtgatgaggggagttttttaaagatttataaggtgtagaggatgggggtgggggggttataagtttatttttgttttgtgtattagaggtagtagagttgtagagagtgagggtggtattaattttttattttttttttttaaagtagagtttttgttaggtttataggggttataagggagatttggggttttttattttgggtttataagaatttttgagttggaaggaaggagtttagagaagttgtttagatttgagatggtagtaatattttttttttattttttttttttttggtggtaggatttgttagggagtttggggttaggtgtttgttaagtggtgttttgagttagggtttgattgggttggggttttttttattattttagtttgggtagatagggagtagtgttaaatttatttttttggaatgtggggtttgtattttttaaatttatttgtggagtttatgttggggtggtggatttgagttttttttagtgaatatattgatagtattattgtttttttaagatttttgtgggtttgtagttttttatatttggtttgtaggagtattttttatttgtgaaaggggaggagtaatttggattagtttaattttattttttatttgttaaaaaagtttttgatatagtttttttttttataagaaaaatttagtataaaattttttaatttaattttaagtattttgtattgaatggagattgggtaggaggtatttgtggtattgggttttagtggaaaggggttttatttttagttttgggggtagatagtttttttttattatattttgtttttattttgtgtttttgatattagttgttgttggaatttttttgttgtgtttttaatttgtgaggtggggggtgaggtgggttaggatttggtttttgttttttaatatttttttttaggttagtaaaaattttagttttaaggattaggttgggggattagattttagaatttgttgtaaattttggggtgggggaaggagggaaatttaggagattgtggtttttttttttttgtttttgtagttttttttttattgtttttatttattttttattaaatttggaaattaaatttagtttgttaattggtgtgggtagagtatagtttttaggtttttgaagttttttatatttggaggatgatgatttttttttgattatatttggagggtgtttagttgtgagttagtggggtatagttttttttttttggtttggatttttatttttttaatttaggaagattgaggtgtgtgtatgtaggtggggtaagtttgggttattgatgagatttgtttgtgtttttgtttttattttggtgtttttttttttttttggtagttttttttttatttgtttattttttgggtttattttgatttatttggtggtgggttttttttttttttgatttttggtggtgtggtttgttttttttttgattttgtgtttggttgttgtgttttgaaggatatgggttatagattgtgtggagatattagttttgtgggtggttgttttggtttaagtagaagaaaattattggggttagtgttgggtatggtagtttttttgttttggagtttgtgttgtttgggtttttttttgttgattttggttttggttgtttttggtttttgataggttgttgagttgtatgaagttttggggttgttttgattttttggtgtttgttttatttttttttttgtttattttttggttagttggggttttgggtgatttggagaggggtaagtggtgttttttagaggaggtgtttttatgtaatttgggggttttggtgggggtatatttggtgggttttagggtgtaagttgagtttttgggagggttagtttagtttagttttttttgtttgtaggggtatgttgtttgtggggtgttggggtgtagggaaattttgtttggtgtgagttttgttttttttgtgtttttggggttttttgggttagttggttggtttttttttattttgttttggtttttttgttttgtgtttaggttttggttgttggatttggtgttatttttggtgaagttgttttgagagggtgaatgaaaaggggggtagtggtggagggtgggggtttggggaggggtgttttttttttttgtggtgtagttggagttggatttaaggggttagtattgttttggttttgtgttaggtggtgggggaggggaggagggatttttttaggggtgggtttggagggggtgggggtggtttttttttttgttttgttgtgggtttattgtttgggaggggtggggagatagtggggggtagttttgggtgggagtggaggtggagatgttgttgttgtagttgttgtggtggttgttgttgttgtagttgttgttggtgttatagtttttttttttggttgagatgtggagtgagtgagtgaaagtggtggtgaggagttttgtgtatattatagttggattttttattttaattttaagttttggttttgtttttagatagttttgtagttaattgttggatgttgttggttttgagttgtgtgtttattggttgtttgttgtggtagtgtgggtgggagtgtagggagagaattatagttggaatttgatttttattttaaaatttaggattgttttttttttttttttttgtttttgggtttgtttttgaaggttggagttaattagattgttgtttagattgaatttatttttttattggttattggggtttttgggatttttttggagggagtttgaagaattagagtatttggtgtggggttttggtgtagggttgtaggttttaggtattttttgtttatgatttttgatttgggtagtagttggaggatggagtttagttttgggtgggtttggggaagaaaggagataggtggtatgggggtgagggttgttattagggggttttagagtgaaattttaggtttttatttggttaattttttattttggagttgagtttggttgtgggattggggaagggaaggagtggagttggatgttttgggggtggggttttaggttggaggggtttagttttggagaaatgggtggagtttgagaaaggttagggtaggtatggtttgggtgtggtttttataaattttttgggtttattggttatatttttgagttaattttgagattttgattttgattttgtaattttaatttgttggatttgattttatattgatgtttttgggttttatttttttgtttttagggattttttgaagggtgtggattttatgtaggggttttgtgtttgaatatgtggttttaggtaggttgtgttggattgtagagtttggatttttaggaggggttgtggagtagagtgaggatttttaagaaggaatttgtgggggttttgagtgtgtgggagggggtggaagtatagagttgggttttattgatttgatttttaaagtttttattattgttattttttaattttgtgttttagttttttttaagtttttatgtggtttagggaaggagtgtttgtggaattggaattttgtgggtttgttgtttttatttatttattttaattttattggtagtgggtttttgtgggtttgtgttttttatgtgtgtatatgtatgtgtagattttggtttttgttttgtttatttttttgagttttggggtttagttggttttagtttttttttgttgttggtgttattttagaaagttgtgggtatttgggagtggagtgttgtgggtgtgttgggtgttggtggaggggggaatagtgaggattagatgttgggaagtatttttttaatatttgtgagaggtagatatggtggaatttagtgggttagttagttttttttttggagattttggggtgtttgtgttattgtggagaggtggtgggatgggttggatgatttttattattattttttattttgttgaggttattatttttgggtgttgtttatttttttaaggttgtattatttatgtagtttttgtgtattttttgttattgtagagggttggggttgttttagtttttgttttggttgatggggggaggggatgggggaagtggtagagtggttgttgtgttgttgtttttttggttgtttttttgttgaatttatgtatagagttgtgtaaatgaggttgggtgggtttatttgtattttatgttaatgagtagattttttaagtgttttttttttttggtgggagtttttgtttttattttgagtatgtggtgtttgagttttgaattttgtgttgttttttgggaaaggggggttatttatggttgttttgtgtgtttgatattttttttttttttgagaggttgtagtttgttgggttggtttgttttttttgttaggatagaggttttggggttggtgtgagaagtagggatgtttaatattttttttttgtagaggggaaaatgaggatagagaggttggtttagtttaatgattaggttttttggtggttagtaggttttatatttttatttattattttggttatttttgggttttggattgaattttgttttagaatatgtttgaaaggagggtaggtataaatgtattatttagataaattgagatttatatgtatttttttgggtttaggatttaggggagattggttatgtaagataggatttgatttttgtatttggtatgttggggttgatggttagttggagatgtttatttttagtttgagtgttagagaggaggtagaggtagaatttatagggaaggtaaagaagatttgaaattatttttatttaattttagttttttaagttttagttttgatattatttttttagagtggttttttttttagtaagtattttaatgttatttaagtgttaaggtgtttaggatatagtattgagttagatataagtttggaattttatagtatttagtttaggttgggattatatgtttgtgtttgtagtaatgaaatgattatttttttatttaggttttgtgtttttagaggggttatgtttattttgtttattagggttttgtttagtgttgggtataaagttgttaggtgaatgaatgattttaggtagggaaagggaaataaagggataagaaatttttttttttgggttttagttttttaataaagatattaagtttaattaagagtttttttgggtttgaggaagaattttttttatatatattttgtttagttagtttttttagttttttttagttttgtttttattttttttttatagtttatttggttttttgtggagttaagataatttttttatttgtgatattttttgtttagggatgatataattattattttatttagttattttaatagttttgagagttgggtggatggttttttattttttagataaggaaggggggtgtttagaatgatgaagttatttaagtgattgtttagatggtatggttttgtttttagtgattttggtttgtaggtgttttgttggtagaatagggtgtatatttaagagggattagtaaaggggaagggatgttgtaggaatttttataattttgtttttgagtgagatttatgtgggattttgttttttttagaaatttgagtatttttgggagaattaattttttaaggaggtaattttttttttttaatttatttatagaattttattattgtgtgtatattttattttaggagggagagaggagttgttgagtagaaagtagattggttgtagggatagaagatattaagggtatttttttttatagttgtgtttggattttttgtgagaagaggaagttttaggggtttttattgtatttttaagattttagagagaaatagaagtgttgaggggttgtaggtaggttttttattttttttgggttttgaatatttatttataggaggttgaaggtaattgttttgtaatttatttatgagggttaatgggatgatagtggtaagaggggttggtatattgtttagattgttttaaagttagggttggggttgttaaaaaggttatttgtgttttattatgttttatttttttttttttttatttttttaggttgggttttatttgtttagttttttgattttttggtaaggttgagtaggttttagttaggaaggggttagttgattttgttggttggagtattaattttttttagatgggttggtggtttgtattgagggtttggttgtttagatagagttgattttggttttagtgattatgtgtggttatgtgtgattgtgtgaagggagtaattttatttagttttttggtttttttttgttttatttttttttattgttgatattttttataagtagtggttttatgaaggtttttttgtttttagtagttttttttggttttttgtgttgtttagttggagggttgaggatgtttggtatagttgatttttaaaggttttagagggatagtttttttttttgttttttttattttgttagttttattattttgtatttgttttttttaaagtatgtgttttagtttttattttttaatttaaggaagatgtatgtgttaaggataggatttaggagtattttttaatatttaggggaaaggatgaggttataggaaggttttttttgtagtaagaaggatttagataga

SEQ ID NO: 266 - DNA, 3720 bp, Artificial Sequence
  chemically treated genomic DNA (Homo sapiens)
tgtagttgtttattaaaattttatatatattttggtatataattatatttgttggaatttattttatagatatatttatatttatatagttaaggatgttgattttaataatattggtataagtaaaaagttggaaattgtttatatgtttatggataggggataaattgattaatttaaggtttttttttataatggagtattatatagttttgaaaaagaatgataagatttttatgttaggatatggtataatttttaagttattttaagtgaaaaaataataataataataatattgtagaataatgtgtatggttggatatatataaatttttttgaaagaatatttaagaaatttaaatgtggttattttaggagttaggaatgaggtaggtggagaggagggatttttattttttaatttagaatatattttgttgtgttagttgattttttttttattgttaataagtattatagttttttttaatttaaattattttttttagtataaatttaaaaaaaaaaaatttaaaatggaaaaatatataggtgtgagtaaaagaaatgaatggtaataatttttgtggtttattgagtgtgtttggatatttatgtgtttttagtttttttttataggaaatgtataggtgagaaattgatgttaagggggattgagtgttaagttagttagtggtagagggtagatttaaatttaatatggtttttttttgttgttttttggtttttgtttttaggtgggaagtgtatttattggatggttggtttggtgaggtgtagtgttttagattggtgtatttgtggttttagtgttttatgtttggggagtgtgtgtgtatgtagtggtgtgagtttggtggtggtggtgataataataatgttatagtttgagtttttttttttggagtttttggtatatattttgtgtttatgtttgggtatttatgttatggtggtagggttggggttttttaaaatggtagtggtttggggagttggaagtttggagttagtgttgttgtagttatataagtgggggggttgtgggttgggggagtttggtagtgttttggagaggtgaggagttgttgtttgaggttggtgtgggtgagtgagggtgttgtggttttttgattttttttttagaggtgagtgtttgaagttaggagtttggtgtttataggtttgtgtgttgtggggaatttttattgttagtttttttgttatttgtgtgtttttaagtttagtgggtgaggttttgggtgttttatagttggtgttgtgttatgttttattttagtgagttttttgaatttgatgtgttttttgttaagtttattgaaggttgttgtgttgaatttagtgttgaattgttttggttgtttgttagggatgtttttgtggttattggttattttggaggtaaggagggtgagtaggggtgtttagatgatgatggtgtagtgtgggggtgtattatatttgagaattaggagggattgggatattggagttatgagaataggggtgatgggaagtttaggagttttggggtgtgtatttttatttttatttatattgggttgttagtgtttttgtaggaatttgtgtggttattggagtgtttttttgtttgtgtatgtgtgttttgtgtgtgtatgtttttatgtgttttttgggatgtatgtgggtttttgttgaattagaatgtgtaaaaggtattttgtgtatatttgtgggtattaagagttttgtaggtaggggttgtggatttaggtgtattttttgatgtgtttagagttgatttttgttttttttttagtaggtgattttttgagttgggttttgaatagttgtggtgtaagtggggatttagttgatttttgttttttggaggggtttgtgtttatatttttttttggttttagttatagtggtagtttttttatttaggtagtgtttgaatatttgtatgatttggaggtattttttaattttatgttgggtgttttaggtttggtatttttttttggtttagaggtagtagtgtttagatttttgttggatgtttttttttttgtggggtttgatgttttgttgttgggtttgttggatttttattttttggatttgggtgttgttttttttttagaggtgttttgggaggttttgttttgtgtgggtgtttttttgtagtgtttgtatgagttttagttttttttgtttgatgttaagtttggtttttggtggttttttgttttgttagtgttggatgttgtttttgtttttaagggtttttatgtgttttgggagttgttttttgtgggggttttagggaattgtgggttatagggagattattaggttgttttggaggtttgtttttttgtaatagggattaagattgaggatttgttgtttattagttgttttgtggaattgttggttgttttagttaatagattttattttagtggggtttatgatgtttttttgttggttttgggtgatttaggggagggggttgagggtttttttgggtttttgattttttttagtggggagggagggagtagtggtgatggtggagagtttttggttagtatgtagttttagttttttttgttgggtttttgtagtgttgttgtggtggatttttttaaatttttggtggtggatatttttggaagtagtggtgtggttgtattatttgtgttgttgttgttgtttattttttttttttaggttaaggtgtgatgtaaggggtgttgtggtggtaaatgtagtatgtgttgtttttgtttgtggttgtatgttaaggtttttgtttgtttggtggagagttgtgtgtggagttttgtgtgttttgatgagtttaattgttatttgtgtatttatatgggttataaatttttttagtgttgtatttgtttttgtaattttagttgtagtgattattttattagttatgtgtgtatttatattggtgagaagttttttgtttgtgatgtgtgtggttgttgttttgtgtgtagtgatgagaagaaatggtatagtaaggtgtattttaagtagaaggtgtgtgttgaggagtggtttaagggttttggtttttatttgttgggttttttttttgtttttttttgagtaagagatgggtttatgggttggggtgttgttgtttggtgtgtatgagttttgggttgtttttttttttgttttttttttaatttttttttgtatgtttgagggttggtttttgttttgtttttagtttttttgaagtgtttgttgtatatgttttatttagtattagtttgttggatagtttttgtggtttaggtgttgttatttttgttagttgtgttttgggggaagttttttgagattatttagtgaataggtattattttgggatttaagatagttttttgtaattgtatatgttttatgtttttttttataatttttagagataggttggggtaggttaaggtggttttgtgtgggattttgtatagtagtgttttatttagtagttgattggatgtaatgttttgttttgggttttttttttttttgttgttgttaatttttgtaaagtagatgttatttttaagtagttgataaaattgtttatttttgtaattaaaattattgtgttaaaagtttattgaatttgttatgtaagttttt

SEQ ID NO: 267 - DNA, 3720 bp, Artificial Sequence
  chemically treated genomic DNA (Homo sapiens)
aggagtttatatggtagatttagtaagtttttagtataataattttaattgtaaaaataaatagttttgttaattgtttgagagtagtgtttgttttataaaaattaataataataaaaggaaaaaaaatttaaagtaaaatgttatatttaattggttgttggataagatattgttgtataaagttttgtgtgagattgttttggtttgttttagtttgtttttgggggttatagaggaaggtgtggggtgtgtgtagttataaaagattgttttgaattttagggtagtgtttatttattgggtggttttagaagattttttttaaagtgtggttgataagggtgatagtgtttggattgtgggaattgtttggtgagttggtgttgaatagggtgtgtgtggtgggtgttttaaggaaattggaagtgggatggaggttggtttttgggtgtgtgaggaggagttggaagaagagtggggaggggaatggtttggaatttgtgtgtgttgaatggtggtgttttaatttataaatttattttttgtttagagagaagtgaaggagaggtttagtgagtaaaagttgaggtttttgagttgttttttggtgtgtgttttttgtttgaggtgtattttgttgtgttgtttttttttattgttgtgtgtgaagtggtggttgtatatgttgtaagtaaaaggttttttgttggtgtgggtgtgtatgtggttggtgaggtggttgttgtggttgaagttgtggaggtagatgtggtattggaagggtttgtggtttgtgtggatgtgtaggtggtgattgagtttgttggagtgtgtaaagttttgtatataattttttattgggtaagtgaaggttttggtgtgtggttgtgggtagaagtagtgtgtgttgtatttgttgttgtggtgttttttgtgttgtgttttggtttgggggaaaggggtgggtggtggtggtggtatgggtggtgtagttatgttattgtttttagggatgtttgttattagaggtttagggaagtttgttgtggtggtgttgtgaaggtttagtggggaaagttgaggttgtgtattggttagaaattttttgttgttgttgttattttttttttttttattaggaggggttaggagtttagggaggtttttagtttttttttttaagttatttggggttagtgggaaagtgttataggttttgttgggatagagtttgttggttgggatggttggtagttttgtagggtagttgatggatagtaagtttttaattttggtttttattatgggaaaatgagtttttggggtggtttggtagtttttttgtgatttatagttttttggggtttttatagaaagtagtttttagggtgtgtagggatttttgaaggtagagatagtgtttagtgttggtgaggtgggaggttgttggaggttgggtttgatgttgggtggggagagttgaggtttatataggtattgtgagggggtatttgtgtaaggtgaggttttttagaatgtttttgggaaaggggtagtgtttagatttggggagtaaaggtttggtggatttggtagtaaggtattggattttgtaggaaaaggggtatttagtggggatttggatgttgttgtttttggattggggaagggtgttaggtttaagatgtttgatatgaggttgaagagtgtttttgggttgtgtgggtgtttgggtattgtttgaatgaagaagttattgttgtagttgaggttgggagggggtgtgggtgtaggtttttttaggaagtaggagttggttaagtttttatttgtgttgtagttgtttaaagtttagtttaagaagttgtttgttgaggagggagtaggaattagttttgggtatattaaagggtgtatttgagtttatagtttttatttataaaatttttggtgtttatggatatatataaagtgttttttgtatattttgatttagtaggggtttgtatatgttttaaggagtatatagaaatatgtatatgtaaaatatatgtgtataggtaaaagggtgttttgataattgtataggtttttgtggaggtgttggtggtttagtgtgggtgggaatgggggtgtgtattttaggatttttaagttttttattgtttttatttttatagttttaatgttttagttttttttggtttttaggtatggtgtgtttttgtgttgtgttgttgttgtttgagtatttttgtttgttttttttatttttagggtagttggtggttgtgggagtgtttttggtaggtagttggggtaatttagtgttgggtttggtgtaatagtttttagtggatttgatgaggagtgtgttgggtttggaaaatttgttaaggtggagtatggtgtggtgttggttgtggggtgtttggggttttgtttgttgggtttgggggtgtgtgggtggtggggaggttggtggtaggggttttttgtagtgtatagatttatgggtgttgggtttttggttttgggtatttatttttgggaaaggagttggggagttgtggtgtttttgtttgtttgtattggttttgggtggtggttttttgtttttttaaagtgttgttgggtttttttagtttatagtttttttatttatatagttgtggtggtgttggttttgggtttttgattttttgggttattgttattttgggaggttttggttttgttgttgtgatgtaaatgtttaaatatggatataggatgtgtgttggggattttgaaaaggaaagtttgagttgtgatgttgttgttgttgttgttgttgttaggtttgtgttgttgtgtgtgtgtgtgttttttaggtgtggagtgttggggttgtggatgtgttagtttggggtgttgtgttttattgggttgattgtttggtagatgtgttttttatttggaggtagaggttgaggggtagtaggggaggattgtgttgggtttgaatttgttttttgttattaattagtttgatatttagttttttttaatgttagttttttatttgtgtattttttgtggagagaaattgagagtatataaatgtttaggtgtatttagtaaattatagagattattgttatttattttttttgtttatgtttgtgtgtttttttattttaagttttttttttttaaatttgtgttaggaaaaataatttaaattaaaaaggattgtaatatttgttaatagtaggaggaaagttaattagtataatagggtatattttaaattgaaaagtaaaagttttttttttttatttattttatttttagtttttgaggtagttatatttaagttttttgggtatttttttagaagaatttatgtatatttaattatatatattgttttgtaatattattattattattatttttttatttgaaataatttagagattgtgttatgttttgatataaagattttgttatttttttttaaggttgtatagtattttattgtaagggaggattttgagttagttgatttattttttatttatgagtatgtaggtagtttttaattttttatttatattaatgttgttggagttaatatttttgattatataaatgtgaatgtgtttgtgagataaattttaatgagtgtaattgtgtgttaaagtatatgtaaaattttgatagataattgta

SEQ ID NO: 268 - DNA, 8759 bp, Artificial Sequence
  chemically treated genomic DNA (Homo sapiens)
tagtttggaagagggtagttaggggagaagttagggttggagttatgagaaaggataagatgagatgatggttttaatattgaggatagaaagaatattgagatgagaaagtagtttattataagtatttatgtaaaggaaatagtagatgtttataaattagtagaggtaataattttgaaagtttatttataagtttttttttttatttttaatttagtttaaatgtaattatttaaattgttttttatttttttttttggattatgaatgagttttttaaatgtagggtttatagtgttttatttattagtgaattttaagtgtttagtatagagtttggtaaatagtaaatgtttaataaatatttgtttagtgtatgaattggagtgattttttattttgtttataagttgaaaaaaggtttattatatatttaaatatgttgaaattatagggtatttggtaattttttaaaattaaaatttttagtttggaaatagaattttaattttgtgaaaataaaatttatttatttatttaaaaaatatttattaaataatgattatgttttatattaggttgagttttaaggatttaatgatgaataaaaattaatatgatttttgtttttaggaaatatatagtttagtgaggaaaatagattgtgagaagttttttaataaatattgggtgttattaaaatatattaaaaggtgagtgggtgagggatttgagttagtttaggtggtttaggaagtttttttggatgtgttgatatgtataggtattaattagataaatagagagaaggatgaattaatattgtaggtagagggaatagaatatgtaaaggtaggaaggattatggagttgttggaggatttgaataaaggttagtgtaagtggattttagaaaataggaggaaaggtgtatgagatgagattagagaggtagattatgtggggtatggttaatgttttggatttttttattaagagtaatggggagatagtgataggatttaaatggggaaataatatgattagattaaattttttaaaaaattttttatgtaaatatatattgagagttaattattgataaagatttaaaggtaataaagtggagagagaatagtatttttaaaaaatggtgttaaaataataggatatttatattaaaagttgggtatttgtttataaaatttaatttaaaatggattatagatttaaatgtaaaattgaaagttatataatttttggaagaaaatatagatgggaatttgtgtgattttgagtttgaaaatgatttattatatttgatattataatttgtaagttaatataatttataagtgaataaagtgatgaattggattttattagaatttaaaatgtttgtgttttaaaagatattggtatgataatgaagataaattatagataagatattgttgaattatatttttgataaaggaattgtgtttagaatatataattttaaaatttttataataaattataagtagtttaattaaaaaaaaaaaaagagaaaaaatttatagtttttattaaagaaagtatataattgtaaaataagtatatgaaaaatgttttgtatttttatttatgggagaaataaaaattaaatgggaaagatatttttaattagaatattaaaattaaaaagattgattatattaagtattggtgaagtggaaatgtaaaatgatataattatttaggaagatgatttggaagttttttataaaagtaggtgtatatttattttgtgatttatttattttatggttaagtatttatttgagagaaatgaaagaatatatttatataaagatgtttatataaatatttatagtagttttatttgtagtagttttaaattgaaaagaatttaaatgtttattaaaagtgaatggataaataaagtgtggtatagtaatgtaatagaatattatttagtaataaagaagaatgagttagtgatatatataatagtttaaatgtatattaaaggtattgtgtttagtgaaagatgtaagtaaaaaaaaaaaagagtatatgttgtatagttttattgatataaaattttggaaagtgaaaaatagtttatattgatagaaagtagattattggttgtttgaggaggaggagtataggagaggtggagggaaaatgtataaagtggtataataaaaatttttggaattatagatatatttattattttgattgagtgatgattttatgagtgtatgtgtgtgttaaaaatgattaatttatgtaattttaaatatgtgtagtttattgtatatattaattatattttagtatggttattaaaaagaaattttttggttgtataatgtagaattgattttaggaaagagtggagggaggatgattatttatagtgttttaggtggaagagaatggtgttttttggaagtgaattaggttggtaataatagagatgaaataaatgggtagatgtgtgagatatttaggaaataaaatttgatggttattattttttaaaggttagtttattttggttttttagagtaaagagttagggaagattttattaataaattttttttgaagttgtagaggaagtttatagtagaaatttatttttaatttgattaatttgagagaatatttttggttttatttgattattaaaaaattgtaaagaataggaggagaaagaagaagaaagttggtataaatagtgaatttatataatattaattaataattgttttttgtttttaaaagtaatgggaagaaaatgagatttgagttggaagattagagtttaaaatttaaataaagtatatggttttaatatgtttatagtagttaattttttttgataatgatataattgttgatagtattatttttaaaaataaaaataatatagtaattttttagatttgtagaatgtttttttgtttataagtttgttttatatatattatgttttttaaatgatatattagttttttgagggtaatttatattggtaatagtttttagatgtggaaattgtgaagataatgttggtgatgtggaagtaatataaattttggagttttttagatttaggtttgaatgttagattgttttttatttagagtaattttagagtattattttttattttaatttttttttaggtttttttgtgtttatgtgttttttttatttttgtttattgtttatttagtgatttttgtatttttttttattgttagtgtgtagatatatagtttttttggttttgagatttatgttaattttattttattattttgttagtttatttaatttttattgagtaatgttagttgaaagttgtggtgggattaaatgttgtaatgagtatttaaatgaggttgaagtatttatgtattttatttatatatggtgaggtatatttaaggaaggttgtagttattaaaattttaggaaataattttttatttttttaggtgaaagggtttttaggtttttgtgttttggaaggtttatttatagttattttttaaatgataatgtgattgatgagtttagagtttagtttaaatagtaatggattggaagattagtttaggttttattaatgtggaatatagaataaattatgtttttgttttagtttgtttatttgtgaaatagagtttattatatttagttttttttgtttttaggtttgagttattttttttggttaaggtaagtaaatgtttatgatgtttggttgtgtataagataaagttataataaagttataatttattttttttttgtagaagattgtaaaaagtaaaagagatttaggtaaaaattttggaatgatttttggaatagagagtttttttagaattagaagttaaaggaatttaaaatatagggaggtttagggtttttattgatataaaggaaagatgttttttttataggtttatgtttatattttttttttttttttatttttatttgtatttttatttttatatagggtttatgggattttttttataaaagagtagttgtagtaatttatattattttttatgtttggttgtttattaagaggtgaaaagtagttttatataggttttatttttggatagttttagttgtaaagtttaaaatatgtgaaggtaatttggaaaagtaagtggttgtatataaagtaaatgtttatagagttttggataaaattgagtgtttatgtgtatatggtaagtgtttttagtgtttgtgtgtttatttgtttgtttgggtgattttgtttttgagagtttggatgagaaatgtatggttaaaggtaattttagataggaagaaaggtagagaagagggtagaaatgatttttgatttttggggttgagggtttttagagtaaatggtataatgttatgaggtttgatttatttttatgatggaatttaaggttttagtaagtatttgttggtttggttatggtttgttttttagtttgtaggagatttttttatttttttatttgtgtgtttttattagttttgaaaagaatttttggtagttaggagtaggtatttttattgtttttttttttttttttttgtttttattttgttggttttttagattgggttttggaattaaatttggtgagtgttggtttttaggaaatttggagttttggtgtttaaattttggtttaggaaagtaggagttatttaggaagtaggggttttttagggttagagttagttttttttgtttttgtttatgttgtgttagtatttgtttttttaaagttattaggtaggtgttagtgtgtggtgaggggaggggagaaaaggaaaggggaggggagggaaaaggaggtgggaaggtaaggaggttggtttggtgggggtgggatttgatttgtaaattgttgtatttgttttttattttttagtgttttttttgagattttggggagttagtttgttgggagagtgggatggtttggagtaagtttagaggtagaggaggtgatagagggaaaaagggttgagttagttgttttagtgttgtataggagttgaagggatgtattatgttagttttagtttggttttagtgatagttaatgttttttgtagtgtggtggttttgaagttgttgtttggagttgtttttttttttttggtgaagtttttaaaagttgttaaagatttggaggaagtaaggaaagtgtttggtaggattgatggttgtttttgttttttttttttttattttgtttttttttattttgtttttttttttttttttgtttttttttttgtagttgttttagttggttatttttagttaattttttttattatttttttttttatttgtttttttgtttttgttggtttagtgttgttagtttgagtttgtagagaggtaattttttttggttgtgagtgggtgagttagttgtatattgtaaagaaggtttttaggagttaggtgattggggagtggttttagtattgtagttatgatttgtttggttaggttgtatgtggagagaattttttgtttttttttattttttttttatttttttttgttttttttattttgagtgtggagttagagattaaaagatgaaaaggtagttaggtttttagtagttaaaaaataaaataaataaaaataaaaaagttgaaataaaagaaaaagataataatttagtttttatttgtatttattttagtggatattgaatttggaaggtggaggattttgttttttttttttaagatttgggtattttttgaatttattttttaagtattaagagatagattgtgagtttagtagggtagattttgtttattgtgtgtttttttttgtatgagattttgaggttgttagagtgttttttgtgtggttgtttttgtaagtttttttttttggagttttttgtaggtgggtagttagttgtagtgattattgtattattatagtttgttgaatttttttgagtaagagaaggggaggtggggtaagggaagtaggtggaagatttagttaagtttaaggatggaagtgtagttagggttgggaagggtttatttttggttgttgtttaagatttattgaggagttttttagaatttgttttagagtgtgtgtgaagtgatttagaatttgggttttaggtatttagaggttgtgagtgtagtattttttggtgttagtttgttgttgttgtagtagtagtagtagtagtagtagtagtagtagtagtagtagtagtagtagtagtagtagtagtagtaagagattagttttaggtagtagtagtagtagtagggtgaggatggttttttttaagtttattgtagaggttttataggttatttggttttggatgaggaatagtaatttttatagttgtagttggttttggagtgttattttgagagaggttgtgttttagagtttggagttgttgtggttgttagtaaggggttgttgtagtagttgttagtatttttggatgaggatgatttagttgttttatttatgttgtttttgttgggttttattttttttggtttaagtagttgttttgttgattttaaagatattttgagtgaggttagtattatgtaatttttttagtaatagtagtaggaagtagtatttgaaggtagtagtagtgggagagtgagggaggttttgggggtttttattttttttaaggataattatttagggggtattttgattatttttgataatgttaaggagttgtgtaaggtagtgttggtgtttatgggtttgggtgtggaggtgttggagtatttgagtttaggggaatagttttggggggattgtatgtatgttttatttttgggagttttatttgttgtgtgttttattttttgtgttttattggttgaatgtaaaggttttttgttagatgatagtgtaggtaagagtattgaagatattgttgagtattttttttttaagggaggttatattaaagggttagaaggtgagagtttaggttgttttggtagtgttgtagtagggagttttgggatatttgaattgttgtttattttgtttttttataagtttggagtattggatgaggtagttgtgtattagagttgtgattattataattttttattggttttggttggattgttgttttttttgttgtttttttatttttatgtttgtattaagttggagaatttgttggattatggtagtgtttgggtggttgtggtggtgtagtgttgttatggggatttggtgagtttgtatggtgtgggtgtagtgggatttggttttgggttatttttagttgttgtttttttattttggtatattttttttatagttgaagaaggttagttgtatggattgtgtggtggtggtgggggtggtggtggtggtggtggtggtggtggtggtggtggtggtggtggtggtggtggtgaggtgggagttgtagttttttatggttatatttggtttttttaggggttggtgggttaggaaagtgattttattgtatttgatgtgtggtattttggtggtatggtgagtagagtgttttattttagttttatttgtgttaaaagtgaaatgggtttttggatggatagttattttggattttatggggatatgtggtaagtttttttttttagaaatgttgttttttggtttagggtagagttattttgtgttttggggtatttagtggtttttatttgtgtgaatatttagattgtttttgggagagtttagtagggtaaatttagagtttttttgtggatttttggtttgttagaggtttaatttgagtttttttaatttttgttgtgtgttttgggtgttgatttttgtttttttagattttttaatttttttaattgttttaaatttttattattttttggtatttgaggttttaaatagaaattttattgtatgggttatttttagagataaagtttttaagttttttattttttttttttttttgtttttaaagtttgagaattttaataggaatttgggtaattttttttttttaggtttgttaggattttatttttagtttgtgtagattagagttaaaaagattggtttaatagttttttagtgggtattttttagagaggtaaagtgaaatttttggttagggaaagaaagtggtttttgggtgttgaggtttgttgtgtgaaagggtgaattttttttttttgaagtaattggggatttgttttagggttggaggttagtagagataatttaaattgttatgtttagagtaggtagaggggtaatttttttggtaaagattttataggatttgtatttatagttttttaatgttggttgattatgttgaaagtagttgtttgggttggtttttttttgtaaagtgtttattttttttgtggattataatagatttatagttttttattttaggtttgtattagatttataaagaggagaatatttttttaatgtataatttaattaggtttgattttgatttataaaattgttggaaaatatttttttgtaaagtattttttgttattttagtgtgttttaaaatttttattggggagggtggagtgaggttttttattatatttttttatttttaggatatgtttgtattttagaatatgtgtagttagtt

SEQ ID NO: 269 - DNA, 8759 bp, Artificial Sequence
  chemically treated genomic DNA (Homo sapiens)
agttaattgtatatattttaaaatgtaaatatgttttaaaaataaaggaatataataaaaaattttattttattttttttagtggagattttggagtatattgaaatagtaggaaatgttttataaaaaaatgttttttaatagttttgtaagttagagttaagtttaattaaattgtatattaaaagaatatttttttttttatagatttgatgtaaatttgaagtagggggttgtggatttgttataatttatagagaaaataaatattttataagagaaaattgatttaagtaattatttttaatatagttaattaatgttgagaaattgtgagtgtaaattttgtgaagtttttattaagaaagttgtttttttgtttattttaaatatgatggtttggattatttttattgatttttagttttggagtaagtttttagttgttttaggagaaagaagtttatttttttatatagtagattttagtatttagagattattttttttttttaattgagaattttattttatttttttggaggatatttgttgagaagttattgggttggtttttttgattttaatttgtgtaggttgaaagtgaaattttaatagatttgaagaggagaaattgtttaaatttttgttgaggtttttagattttgaggataggaggaaaggaagagtggagggtttgggagttttatttttgaaggtggtttgtgtaataggatttttgtttgggattttgagtattaggaggtagtgagaatttggggtggttgggggagttgaagaatttgggagggtaggaattagtatttagggtatgtagtagaaattaggagagtttaggttaaatttttggtaggttgggagtttatgggagagttttaggtttattttgttgagtttttttaggggtaatttgagtgtttgtgtaggtaggagttgttagatattttagaatatagagtgattttgttttgggttgaaaggtgatatttttggaaggaaaaatttattgtatgtttttgtaaggtttggagtagttatttatttaggggtttattttgtttttgatataagtgggattgggatagggtattttgtttattatgttgttagggtattatatattaggtgtggtgaagttgtttttttggtttgttagtttttgagggggttgagtgtagttgtagggggttatagtttttgttttgttgttgttgttgttgttgttgttgttgttgttgttgttgttgttgttgttattatttttattattattatatggtttatataattggttttttttggttgtgaagagagtgtgttaggatgaggaagtggtggttgagggtgatttagaattgggttttgttgtatttgtgttatgtaggtttgttaggtttttatagtggtattgtgttgttgtagttgtttaggtgttgttgtagtttagtgggttttttagtttgatgtgagtgtggggatggggaggtggtggagggggtggtggtttggttagagttagtggaaagttgtagtagttgtgattttggtatgtagttgttttgtttagtgttttggatttgtagagagatagggtagatggtagtttaagtgttttggagttttttgttgtagtgttgttagagtagtttaggtttttgttttttagttttttggtgtaattttttttgaaaggggaatatttagtagtatttttagtgtttttgtttgtgttgttgtttagtagagaatttttgtatttggttaatggggtataaggagtgggatgtatagtgggtggaatttttaaaagtggggtgtatatgtaatttttttgaagttgtttttttggatttagatgttttaatgtttttatatttaggtttatggatattgatattgttttatataattttttggtgttgttagaaatggttgaagtgttttttaagtaattgtttttggaggaagtgggagtttttgaggttttttttgtttttttgttgttgttgtttttggatattgttttttgttgttgttgttgaaggagttgtatggtgttggttttgtttaggatgtttttaaggttagtggagtagttgtttaagttggggaaagtggggtttagtagggataatgtggatggggtagttgagttatttttgtttggaggtgttggtagttgttgtggtagttttttgttggtggttatggtggttttaggttttgggatgtaattttttttggggtggtattttagggttgattgtggttgtgaaggttgttgttttttatttaggattaggtagtttgtggggtttttatgatgggtttggggagaattatttttattttgttgttgttgttgttgtttggggttagttttttgttgttgttgttgttgttgttgttgttgttgttgttgttgttgttgttgttgttgttgttgttgttgtagtagtagtaaattggtgttgggaggtgttgtgtttgtggtttttgggtgtttggggtttgggttttggattattttgtgtatgttttggaatagattttggaaagttttttggtaggttttggatggtggttgagggtagattttttttagttttaattgtatttttatttttgagtttggttgaattttttatttattttttttattttgttttttttttttttgtttagaagagtttaataggttgtgatgatgtggtagttgttgtagttagttgtttatttgtgggaagttttagagaaggaaatttgtgggagtaattatgtaaaaagtgttttgatagttttaaagttttgtgtagaagaagatatatggtggataagatttgttttgttaggtttatagtttgttttttaatatttgaagggtagatttaaaagatgtttagattttaaaagaaaaaaataaaattttttattttttaaatttagtgtttattgaagtaggtgtaaataagaattgagttattattttttttttttattttggtttttttgtttttgtttgttttgttttttggttattgaagatttgattgtttttttattttttgatttttggttttgtatttggggtggggaaggtaggaggaggtggagagagagtgggggaaaatagagggttttttttgtgtgtagtttaattaggtgggttgtggttgtagtgttgaagttgttttttagttgtttggtttttaagagttttttttgtaatgtgtagttagtttgtttgtttgtagttaaagggagttatttttttgtaaatttgggttggtagtgttgggttgatgggggtgggggggtgggtggggagaagggtggtgaggggggttggttgagagtagttgattgaggtagttgtgggagagaagatgggggagggggggaaggtagggtggggggaggtggggtggagaggaggaggataaaggtagttgttagttttattaggtattttttttgttttttttgagtttttagtagtttttaaaaattttattgaagaggaaagggtagttttgggtggtggttttgaagttgttgtgttgtaagaggtgttggttgttgttggagttgggttggggttggtgtggtgtgtttttttggtttttgtatagtattggagtggttagtttggttttttttttttttgttgttttttttgtttttgggtttgttttggattgttttgtttttttagtaagttggttttttgggattttggagggggtgttgggaggtggagagtaaatgtaatagtttgtgagttgggttttgtttttattgggttggtttttttgtttttttattttttttttttttttttttttttttttttttttttttttttttattgtgtgttaatgtttgtttagtggttttggagaaataagtgttggtgtagtgtgggtgagggtaggagaggttagttttagttttggaggatttttgttttttgaatagtttttgtttttttaaattaaggtttaggtgttagggttttagattttttggaggttagtatttattaaatttggttttaaagtttaatttaaaaaattaatagggtggaggtgagggagggaggaaaaggatgataggaatatttgtttttggttgttaggggttttttttaggattgataagagtgtgtagatgggagagtgggagagttttttataaattgaggagtaagttatgattaagttagtagatatttgttgaaattttagattttgttatagggatagattgggttttgtggtattgtgttatttgttttaggaatttttagttttaagaattagaggttatttttatttttttttttgtttttttttttgtttggaattgtttttaattatgtattttttatttagatttttaaaggtaaaattatttagataagtaggtaaatatataaatattaaaaatatttgttatgtatatataggtgtttaattttgtttagagttttgtaaatgtttgttttgtatgtagttgtttgtttttttaagttgtttttgtatattttaaattttataattggaattatttaaggatagaatttatatagggttgttttttgttttttgatggatagttaggtgtagaggatgatgtgggttattgtaattgtttttttgtggaggaggttttataagttttgtgtaaaggtggagatgtaagtgggaatggaaagagagagaaaatgtaaatgtaaatttataaggaaaatattttttttttatgttagtagagattttgggtttttttatgttttaaatttttttgatttttgattttggggaggttttttgttttaaaagttattttgagatttttgtttgggttttttttgttttttgtagttttttatagagaaaagatgggttgtagttttgttgtagttttattttgtgtatagttaaatattataggtatttatttattttgattaaagaaggtaatttaaatttaaaggtaaggaagattggatatgataggttttattttatagatgaataggttgaaataaggatataatttgttttatgttttatattagtaaaatttaaattagttttttagtttattgttatttgagttagattttagatttattaattgtattgttatttgggaaatggttataaatgaattttttagaatataaaggtttgaagatttttttatttgaggaggtgaaaaattattttttgagattttaatggttatagttttttttgaatatattttattatatgtaagtagaatgtgtagatattttaattttatttgaatatttattgtaatatttaattttattataatttttaattagtattgtttaataggaattgagtgggttggtaggatggtagaatggaattaatataggttttagagttaggagaattatgtgtttatatattaatagtgaaggaaggtgtaaaaattattgaatgaataatggataggagtgaagaggatatatagatataaagaggtttgaaaaaaaattaaggtgagaaataatgttttgaagttattttgaataaaaagtagtttgatatttaaatttgggtttgaaagattttaaagtttatgttgtttttatattattaatattgtttttatagtttttatatttgaaaattgttgttaatataagttatttttagaaggttagtgtgttatttaaaagatataatgtgtatagaataaatttgtaaataggaaagtattttataaatttgaaggattattatgttatttttatttttaaagatggtgttgttaataattatattattattaggaaaggttaattattataagtatattagggttatatattttatttggattttgaattttgattttttagtttaaattttattttttttttattgtttttaagaataagagataattattgattaatattatataagtttattgtttgtattagttttttttttttttttttttttgttttttgtagttttttagtaattaaatggaattagaggtgtttttttagattagttaggttgagagtaagtttttgttataagttttttttgtaattttaagagggatttattaataaagttttttttagttttttgttttggaaagttaggatgagttgatttttggaaaatggtgattattgggttttattttttaagtattttatatatttgtttatttattttatttttgttgttgttaatttagtttatttttagaaggtattgtttttttttatttggagtattgtaaatggttattttttttttatttttttttagaattagttttgtattgtgtagttagagggtttttttttaatagttgtattgaggtataattgatatatataataaattgtatatatttaaagttgtataaattgattatttttgatatatgtgtgtatttatgaaattattatttaattaagatagtgaatatatttatgattttaaaagtttttattgtgttattttgtatattttttttttattttttttatattttttttttttaggtaattaatgatttgttttttgttagtatagattgttttttattttttagagttttatgttaatggaattatatagtatgtatttttttttttttttatttgtattttttattgagtataatgtttttgatgtatatttaagttgttatgtatattattagtttatttttttttattgttaagtagtattttattgtattgttgtattatgttttgtttatttatttatttttgatggatatttgggttttttttagtttggggttattataaataaaattgttataaatatttgtataaatatttttgtatggatgtatttttttattttttttaggtaaatatttagttatggaatgggtgagttatagggtaggtatatatttatttttgtaagaaatttttaaattatttttttaagtgattgtattattttatatttttattttattaatatttggtatggttagtttttttaattttagtattttaattagaggtgttttttttatttaatttttattttttttatgaataaagatgtagagtattttttatgtgtttattttataattgtatattttttttgatgaagattgtaaattttttttttttttttttttttaattgggttatttgtaatttattatgggggttttagagttatgtattttgagtataatttttttattagaaatatgatttaataatattttatttgtagtttgtttttattattatattagtgttttttgaagtataaatattttaaattttgatgaagtttagtttattattttgtttatttatgaattatgttaatttatggattatggtgttagatataataaattatttttaaatttaagattatatagatttttatttgtgtttttttttagaagttgtatagtttttagttttatatttaggtttgtgatttattttgaattaagttttgtagatagatatttaatttttaatatagatgttttattgttttggtattattttttgaaaatattattttttttttattttgttgtttttgaatttttgttaataattaatttttaatatatatttgtatagagggttttttagaaagtttaatttggttatattatttttttgtttaagttttgttattgtttttttattgtttttaatagaaaagtttaaaatattaattatattttatatgatttgtttttttgattttattttatatatttttttttttgttttttgagatttatttatattggtttttatttaggttttttaatgattttataattttttttgtttttgtatattttgttttttttatttgtaatgttggtttatttttttttttatttatttagttaatgtttatgtatattagtatatttaggaagattttttgaattatttaggttagtttaagttttttatttatttattttttaatatattttaatagtatttagtatttgttggaggattttttataatttgttttttttattgaattgtatgttttttaagagtaggaattatgttggtttttgtttattattgaatttttaggatttagtttggtgtgggatatggttattgtttaataaatattttttgaataaatgaatggattttatttttatagaattaaaattttgtttttaaattgggagttttggttttggggggttgttaaatgttttgtgattttagtatatttaggtatgtaataaatttttttttaatttatgagtaaagtagagaattattttaatttatgtattgaatgaatatttgttaagtatttattatttgttaggttttgtgttaggtatttggaatttattgatgaataggatattgtggattttgtatttaaggagtttatttatgatttaggaaggagagtgaagaataatttaaataattatatttgaattggattggagatgaaaagaggggtttatgaataaatttttagagttgttgtttttgttgatttgtggatatttgttattttttttgtatagatgtttataatggattatttttttattttaatattttttttgtttttaatgttgaagttattattttattttatttttttttatagttttagttttaattttttttttggttgtttttttttaggtta

SEQ ID NO: 270 - DNA, 8404 bp, Artificial Sequence
  chemically treated genomic DNA (Homo sapiens)
aggaagttaaaaattttgaaaaaaggttagaggaattgttatttaaaataagtagtttagagaagaatataaatgatttgatggagttgaaaaatatagtataagaattttgtgaagtatatataagtattaatagttaaagtagaagaaaggatattagagattgaagattatttttatgaaataaagtgtgaagataagattagaggaaaaagaatgaaaagaaatgaataaagtttttaagaaataggggattatgtgaaaagattaaatttatgtttgattgtttttgtatttgaaagtgatagggagaattgaattaagttggaaaatattttttaggatattatttaggagaatttttttaatttagtatgataggttaatattttaatttaggaaatatagagaatattataaagatattttttaagaagagtaattttaagatatataattgttagatttattaaggttgaaatgaagttaaaaatgttaaaagtagttagagagaaagttgggttatttataaagggaagtttattagattaatagtggatttttttgtaaaaattttataggttataaaagatgggggttaatatttaatatttttaaagaaaggaatttttaatttagaattttgtatttagttaaattaagttttataagtgaatgataaataaaattttttatagataagtaaatgttgagagattttgttattattaggtttgtattataagagtttttgaaggaagtattaaatatggaaaggaaaaattggttttagttattgtaaaaatatattaaattgtaaagattattgatattatgaagaaattaatgggtattaattaatgggtaaattaattggttagtattataatgataggattagatttatatataataatattaattttaaaagtaaatgggttaagtgttataattaaaagatatagattggtaagttggataaagagttaagatttattagtgtgttgtatttagtagatttattttatatgtaaagatatgtgttttaaataagggaatggaggaagatttattatagtaatggaaagtaaaaaaaaaaaaaagtaggggatgtaattttagtttttgataaaatagattttaaattaatgtagattagaaaaagataagaagggtattatatgatggtatagggattaatgtaatatgaagagttatttattttaagtatgtatgtatttaatataggagttattagatttataaagtgagtttttggagaggaagaaagagatttagatttttatgtaataatagtgggagattttaatattttgttgttaatatttgatagattaatgagatagagtaattaataaggataattaggattttaagttagttttgtattatttagattaaatagatatatttaatatatatatatatatatatatatatatatatattttttgagatggggttttgtttttgttgtataggttgaagtgtagtggtatgattttagtttattgtaatttttgttttttgggtttaagtgatttttttgttttagtttttagagtagttgggattataggtatttgttattatatttagttaattttgtatttttggtagagatgtggttttattatgtttgttagtttggttttaaatttttgattttaggtgatttatttgttttggttttttaaattgttgggattataggtgtgagttattgtatttggtttagattttgttgaaattttaatatttttttggtaatgtaatagaaaattaaagattttgatggtgaatttaattgtttttgagttgtgtggatgaaaatatattttattatttttttttttaatttttaagtttttaggtatatgtgtaggatgtgtaggtttgttatataggtaaatgtgtgttatggtggtgtgttgtatagattaatttattattatggtattaagtttagtatttattagtttttttgatgttttttttttttttatttttttttgttataggttttagtgtgtgttgtttttttttttgggtttattttatggtatgtatgtgtgtatgtgtgtgtgtgtgtgtgtgtgtgtgtgtgtgtgtgtatttatttatgtgtatatattatgatatatatattatattttttttaaattattattttaggtttagggatatatgtgtaagtttgttatataggtaaattgtgtgtttttggggtttggtgtgtatagatttttttattatttaggtaataagtgtagtatttgataggtagttttttgattttttgtttttttattttatatttttaagtaattttttagtgtgtgttgtttttttttttatgtttatgtgtttttattgtttagtttttatttataagtgagaatatgtagtgtttggttttttgtttttgtgttagtttgttgaggataaaggtttttggttttatttatgtttttgtaaaggatatgattttatttttttttatggttgtaggaaaatatattttatatattagtgaatatagttaaattaatttatggttaagatatatatttttttgtaaattgagaaatttttttattataattgtaatatggtaataaataaatttagattatataaatgtaatttagatgttgataaattggttttaaataaagtaagtgatatttatgtatgaagagagtttattttagtttttagaatttttttttatttttttgttatttttatttttagtaagtaagtatttattgtgtgtgtaatattgtgttaggtattaaggtaatgatgatatttaagatttggtttttattttgaagataagtataggagaaatattattagttatgatgttttttgttgtaaataagtgaaaattttagtttagtttaggttagttttagggttggttaaattagaggtttatttataatattgaggatttagatttttttgaaattttttttgtattaatattagtatttttattttttttgtagggtggtttgttttatgttataatggttgtagtaattagaagtgttatatttttagtaatatttaatattattattattatttaataatatttagaattgtgttatttttgttttaatttattaggtttttagtagattattttttattttttaaatgttaaaattgtattttgagtttttgtttaaattaatttggggtgaggtgaatggaagtagtattttaattgtatttattttttgtagttggatttgggtttgggttattttttgatatttgtttataagaaagatttttgaagttaggtaggaatggttgttgagtaggttagtgtttgttaaatttttatatatttttatatatgttataatatgtagataaaaagataattttttatataatttgttgggataaatttaggaggtttatagtatgatttgtttgaaggttttttttgttttagattttgtttagttgttttaggatgaggggatttatattatagtataattgtattttatttatagtataaattattttttttttttttagttgatgagtttagatgggtaataatagtgtttgttaaagagaaaaaaaaatgtatttaaattagataatttattggtataaatattgagatatagaagtgataatagttttaagttaatgtttgatggtggtagttttagtaagtttttttttgatgtttttgtgtttttgtatatgttttttttttgttattgttttttttattaaatataatataatggataagtggaattaaatagaattgagtttaaattttttgttatttattggttttggtattggataaattaatttttttgagtttgtttttttatttgtaatgtagattagttaatattatttattggaaagtgttgttttttagttaatgtatgtaaggtttaaaatttagatgatgggttgataggtgtagtaaatttttatggtatatgtatgtttatgtaataaatttatatgttttgtatttgtattttggaatttaaagtaaaaaaaaaaaaaaaaaaaaaaagaaagaaagaaaaagaaaaaaaaggttgtttttggggattaaataagataattatgtaaggtggttagtatagtttttggtatatagtaaatgttaggtttgtttgatagatttttatttagtagttattgtttttttgaaaattttttttagatgtttttatggtgttttttgtttttatattattataattttttattatattattatttgtttattttttatagttttttttttttttttttttaattagtgattttaaaaggttagtaagtgtttaatattttttattttttaagtgattggtaaagttttgtatttattagtgttttaagtttgtttttgttttggttgattttgtaaaatggattgggtgggatgagaggtggggggtgttgttaaggagggagagtggtgtttttgttgagggtgtattagttagatattttttgtggggtttgagagttttttttattagattttgggatagggatgaggtttatagttatttattagattttttgtatagttttgttaagtgtattttggtttggagggggtggttttgggtagaagtatgtttgggttgtgttggatgttttttggaaggtgtttggatttatgttaggttttttagtttaattttttatgatttagtgttttagtttgtgtattgattagtgttttagttttttatagatgttggtgggtttgggagttttgtggatgtgatgttgtgggtggaagtgatgtttttttgtggttggatgtggtgtttagttgttgggtgggggagggtgtgtttggttttttttaggggatgttgaaattatttttgtaatgggagttgggagaggatggggtgtgttttgatgtgtgtgtgtgttgttttttttggtgtttttttatagtttgttggtttttgttgtggaaaggtgttatgttgtttaaaattttttgaaaaatggttgttattgttgttgttgttgttgtggaatttttggtattgttgttgttgtttttttttgaggaggatttagagtaggatagtggtttggaggatttgttttttgttaggtgagtgagtagagttgttgttgttttatgtgggaagggtgttttgggtgtgtgtagggtgggtgtaaggtggtttggtggggatttgtttttgttaggggttgggttttggtgggaggaggtgttttttttgttttttgttatggtggagtgtttgtagaatggtgataggattttgggtttttgggtgaggggttttggttttaatttgataggtgttgggtgggtggggttagggttttgagtgaagtgataggtgtagtttttttttgtgaggtttggaggtagagggttgttgtgagtgtttattagatgtaaaaaatgaaaaataaaaatataaaaatggtgtttgtgggagagttttttattggagaattggagtattttggtggttgtttgattttttgttttggtttatgtgatgtaatagttgggaagtatttttttttgggtgtgtattgtatttgaagtttatttgtgggagaggttgattagaaagttttggataagaagtgtagggttttgagtgtttattgtttataggatatttggtttaggagttttgtggtgtttttttagaataataatgtattgaggttttggggatttaaagttatttgtagtgattgatggagtgtaattttttagaggaattgaaatatgggtaaaatttttatgagatatttattagaagtgtttgaaagtttttaaattttttttttttttgtttgatgaattttttttgtgtgttagttggttttggtttgttttattattttttttattttgttttttgattttgaattagtaaggattttggtgttttttttttttgtttttgtttttggtataaaattagtggttttgtgtgtaaatggaaatttttgtttttttttattaagtggaatttaaatttaagtaagtttatatgaatgtattagattttgaagggaagtatttattgtattataatattttattttttttgatttttttattttatggttaaatagttatgattgaaagagtgtaattgttattattgttagtattggttttattttgagataagtttattgtagagggaatgggatttgtttttgttttttattatttttttttttatttttgtttattattaaatttttttatttttatttatttttttttatttggtatatattaataatttatggtagaaaagattgaagtgggatttaggaaatggtttttggaaggttattaaaaatttatatatttaaatggattgttttataggttagttaaaaattatatttgttaaaaaattaaaataataataataaaaaattaaaaattatgtttggggtatgttttgggaaaagatatggttttagtttttgattaaattttgatgtatttaatttttgtaaattttttttgggaaaatgtagtaatggttattttaaagaattttatgttatgtatatagttttggaagtatattttaatgtagggtaattaggaatattgatgttgtggttattgtttggaaaaaagaggattgttttttttattttttaatttattttatatattttaagtaatggaattataaaaaatttttttataagttaaaattatataagatatagtttgtttttgattatttatatttataaagggttttattaatatagatagttgaattttataaattaattagtaagggtagaattattgttgtgtagtttgatattgagtattttgtttggagatggaattaaggtttagtttaattgtatttttagtgatagattttatttttgatttgagagtttagattttatttttgttgttttatttttggtttaagtaatgtagttggaagggaaattgttattaggaatagtatattatatttattgttgaaataattaaaggttaattatgttttgagttgggtgtgatggtgtgtatttgtagtttatgttatttaggaggttgaggtaggaggattatatgagtttgggagttggaggttagtttgggtaataatgtaagattttagtttttaaaaaaataaaaaagttgattaggtatgttggtttatgttgtaatgttagtattttgggaggttaagatgggaagattgtttgaggttaggagtttgagaggagtttgggtaataaaataagattttgtttttaaaataaattttaaaaaattagttagtggttgtggtatatttgtaggtttatttatttaggaggttgaggtgggaggatttttgagtttaggagtttgagattgtagtgagttatgattttattattgtattttagtttggatgatagagtgaaattttattttaaaataagaaaaaaaaataaaaattaattatgttttgaaggaggaattggtagtttagaatagtggttaagggtatggattatagagttagattgttgggtttatatagtggtttattttttattggttgagattttaggtaagttttttaatttttttaatttgatagatatttgtaaatgtttatttttatagatgagaatatttatttaaaagggttgatgttgggatttagtgaaattatatgtttaaggtattttttataggattatagtaaatatttaaaaattattaattattttttatattatttttattagtagataatatatagaaattagatgaatgaaaatgaattagttaataagaatttattaaatgtttgtttttgttaaggggaaaggataaaaataagtagttgtattatgtaagatgtgttagtaggtagagagatatatgaaatattgataagagaagattatagtttaataaagttattggtgttgaattgtataatattatttatgggtttttatttttttgttgttatttttattttatttttttaaatagttttagttattatatttatttttttttatagaagtgttttgttgttttgaagtatatttgatttattatgtaagtaaatattttttattgtgtggtatttttattttggaatgattatgaaaaagataattatatgtttaaatttgaagtgtaatgtttttttaagataaaataagattttaaagtatttaataatgtttttttttatagtagtgttatgtgtaaattattgaaataagtatgtattgaattaatttgatttataagtatatgttaattatatgattatttttatttggtagg

SEQ ID NO: 271 - DNA, 8404 bp, Artificial Sequence
  chemically treated genomic DNA (Homo sapiens)
tttattaaatgaaaataattatataattggtatatatttataaattaaattgatttagtatatatttgttttaatagtttgtatataatattattgtgaaaaagaatattattaaatattttaagattttattttattttagaaaaatattatattttaaatttaaatatatgattattttttttatggttattttaaaataaggatattatatagtgaaaaatatttgtttgtatggtaagttaaatatattttaaagtagtaaaatatttttgtgaaggaaagtaaatgtaatagttaaagttgtttgggaaaataggataaagataataataaaaagataaaaatttatagataatattatataatttaatgttagtgattttgttaaattgtagtttttttttattaatgttttatatatttttttatttattagtatattttatatgatgtgattgtttatttttgttttttttttttaataaagataagtatttaataaatttttgttggttaatttatttttatttatttaatttttatgtgttatttattaataagaatagtatgaagaataattaataatttttgagtatttattatgattttgtagaaagtattttaaatatatggttttattgaattttgatattagtttttttagataagtatttttatttgtaaaagtagatatttatagatgtttgttaaattggagaagttaaagaatttatttgaggttttagttggtaagaggtaaattattatgtgagtttaatagtttaattttataatttatgtttttgattattattttagattgttaattttttttttaaaatataattagtttttgttttttttttttgttttgaaatagggttttattttgttatttaggttggggtgtagtggtgaaattatggtttattgtagttttaaatttttgggtttaaggatttttttattttagttttttgagtagatgagtttataggtgtgttatagttattggttaattttttaaaatttgttttagagatagggttttgttttgttgtttaggttttttttaaatttttggttttaagtaatttttttattttggttttttaaagtgttggtattatagtgtgagttaatatgtttggttagtttttttgtttttttaaagattggggttttgtgttgttgtttaggttggtttttaatttttaagtttatgtgatttttttgttttagttttttgagtagtatggattataggtatgtgttattatatttagtttgaaatatgattaatttttgattattttaataatgaatgtggtatgttgtttttagtgatagttttttttttagttatattatttaggttagagataaggtaatagaaataagatttaaatttttaaattaggaatggaatttgttattggaggtgtagttggattgagttttgattttatttttaggtaagatgtttagtattagattgtatggtagtggttttatttttgttggttaatttatagagtttaattgtttatgttaatgaaattttttgtgggtatggataattaagaatagattgtattttgtatggttttgatttataagagaattttttatagttttattatttaaaatatataaaatgagttaaaaaatgaaagaaatagtttttttttttttaagtagtggttataatgttaatatttttggttattttatattagagtatgtttttaaagttgtgtgtataatatggaattttttagagtagttattattgtatttttttaagggaaatttgtaagaattggatatattagaatttaattagaaattaaagttatgtttttttttagaatatgttttagatgtggtttttaattttttgttgttgttattttggttttttaatgaatatggtttttaattgatttataagatagtttatttaaatatataaatttttaatagttttttaggggttattttttaaattttattttaattttttttgttgtgaattgttagtgtatattgagtggaaagaaatgggtgagggtgaaaggatttggtgatagataagaatgggagagaaaatagtgaaaaatagaaataagttttattttttttgtaatgaatttgttttaaagtagaattagtgttgataataatgataattatatttttttaattatagttatttaattataaagtagaaaaattaagaaaagtaagatgttgtaatataataaatatttttttttaagatttagtgtatttgtatggatttgtttaaatttagattttatttaataagggaaaatgaaaatttttatttgtgtatagaattattaattttgtgttaaaaataaaggtaaaaagaggggatattaagatttttgttggtttaaagttaaaaggtaaaatggaagaaataatgagataagttgaagttgattaatatgtaagaagagtttattaaataggaaaaaaaaaagtttagaaatttttaagtatttttggtaaatgttttatgaaagttttgtttatgttttagtttttttaaagagttatgttttattaattattatagatggttttgagtttttaaggttttgatgtattattgttttaaggaaatgttgtaaagtttttgagttgagtattttgtgggtaatggatatttaggattttgtgttttttgtttaaggttttttggttggttttttttataaatggattttagatgtagtgtatgtttggaagaaaatattttttaattgttgtattgtgtgaattaaaatagaaagttagatgattattggagtattttaattttttggtgaaaaatttttttatagatattatttttgtatttttattttttattttttgtgtttgatggatgtttgtaatgattttttgtttttgagttttataagagggaattgtatttgttattttgtttaggattttagttttatttgtttgatatttgttaagttgaagttgagattttttgtttaagaatttagaattttgttattattttgtagatgttttgttgtggtggggggtagggagggtgtttttttttgttgggatttggtttttggtgaggatgggtttttgttgagttgttttgtgtttgttttatgtatatttggggtgttttttttgtgtgaggtgatggtggttttgtttgtttatttgatgagaggtaggttttttgggttgttgttttgttttgggttttttttaggagggggtggtggtggtggtgttgggggttttgtggtggtagtggtggtggtggtggttgttttttggggggttttgggtggtatgatgtttttttgtggtgggagttagtgagttgtggaggagtgttggggaggatgatgtgtgtgtatgttggggtatgttttgtttttttttgatttttgttataaaaataattttaatgttttttgagaaaaattggatgtgtttttttttgtttggtaattgagtgttgtgtttaattgtgggaaaatgttatttttgtttgtggtgttatgtttgtgaggtttttgggtttgttggtgtttgtggggaattggggtgttggttggtgtgtgggttgggatgttaagttatgaggaattaaattgggaaatttggtgtgggtttaggtgttttttaggaggtatttggtgtggtttggatgtgtttttatttagaattattttttttaggttggggtgtatttaatggggttatataaagagtttggtgggtgattgtgggttttatttttattttggggtttgatagggaagatttttgggttttgtagggaatatttggttagtgtatttttggtgggagtgttattttttttttttggtggtgttttttattttttattttgtttaatttgttttgtaaagttggttaaaataaaaataaatttggagtgttgataggtgtggaattttattagttatttagaagatagaaaatgttagatatttgttggttttttgggattattggttagggaaaggaagggagggagttgtggggaatgaatggatagtagtgtaataaaggattgtagtggtgtaagaatgggaagtattgtggaaatgtttgaggaagatttttaggggagtagtagttgttgaatagaagtttgttaggtaggtttgatatttattatgtattaggaattgtgttggttattttatataattgttttatttaatttttagaaatagttttttttttttttttttttttttttttttttttttttttttttttttattttaagttttgggatataagtgtagaatgtgtaggtttgttatataggtatatgtatgttatggaggtttgttgtatttattaatttgttatttaggttttaagttttgtatgtattagttaagaaataatgttttttaatgggtagtattagttagtttatgttgtagatgaggaaataggtttagaggagttaatttgtttaatattagggttgatgggtagtagagaatttgaatttaattttatttgattttatttgtttattatattatgtttgatgaagaaaatagtgatagagaaggagtatgtgtaaaggtataaagatattagaaaagagtttgttgggattattattattaaatattggtttaaagttgttattatttttgtgttttggtatttgtattaatagattatttagtttgaatatatttttttttttttttggtagatattgttattgtttatttgaatttgttaattgagaaggaaagagatggtttatgttgtgaataaaatatagttgtgttgtgatgtaaatttttttattttggagtagttgagtaaggtttaaggtaggaagaatttttaagtaggttatgttgtaagttttttgagtttattttagtaagttgtataagggattatttttttatttgtatattatgatatatgtgaggatgtgtaaaggtttggtaagtattggtttatttaatagttatttttatttaattttagaaattttttttgtgggtaaatgttaggagatagtttaggtttaggtttagttataaagaatgaatataattaaagtgttatttttatttattttattttagattagtttaggtaagagtttaggatgtagttttgatatttgaaagataaggagtagtttgttgggagtttgataaattgaaatagggatggtatagttttaaatattattaaataatagtaataatattaagtattattgaggatgtgatatttttgattgttgtagttattgtaatgtgaggtaagttattttatagagaaggtagaaatgttgatattggtgtaggaggaattttaaaagaatttggatttttagtgttataaatgagtttttgatttggttagttttggagttgatttaagttgagttgaggtttttatttgtttgtaatagaaagtattatgattgataatgttttttttgtgtttatttttaggatagagattaaattttgggtattattattgttttagtatttagtatagtgttatatatatagtaaatgtttgtttattaaaagtagggatggtaggaaagtgaaggaaagttttaggaattgaagtaaattttttttatatgtagatattatttgttttatttaaaattagtttattaatatttagattatatttatgtaatttagatttatttattattatattataattatgataaagagattttttaatttataaaagaatatatgttttgattatggattaatttaattatgtttattagtatgtaaaatatatttttttgtagttataaaaaggaatgagattatgttttttgtaggaatatggatggagttagaagtttttatttttagtaaattaatgtaggaatagaaaattaaatattgtatgtttttatttataagtgggagttaaataatgagaatatatggatatgaagaggggaataatatatattgggggattatttgagggtgtagggtgagaggatagaagattaaaaaattatttattaggtattatatttgttatttgggtggtgaaaaaatttgtatatattaaattttagagatatatagtttatttatataataaatttgtatatgtatttttaaatttaaaataatagtttgaaaaaagtgtggtgtatatattataatatatatatataaatagatatatatatatatatatatatatatatatatatatatatatatatatatatattataaaatagatttaggaaggggaataatatatattggggtttgtagtggggaagggtggggagagggagagtattaggagagttaatggatgttgggtttaatattatggtgatgggttgatttgtgtagtatattattatagtatatatttatttgtgtaataaatttgtatattttatatatatatttgggagtttaaaagttgaaggaaaaaataataaaatatatttttatttatataatttagaagtaattgagtttattattaaaatttttagttttttgttgtattattaaagaagtattagaattttggtagagtttagattaggtatggtggtttatgtttgtaattttagtagtttgggaggttaaggtgggtggattatttgaggttaggagtttgagattaggttggtaaatatggtgaaattatatttttattaaaaatatgaaattagttgagtgtggtggtaggtgtttgtaattttagttattttggaggttgaggtaggagaattatttgaatttaggaggtagaggttgtagtgagttgagattatgttattgtattttagtttatgtgataagagtaagattttattttaaaaaatatatatatatatatatatatatatatatatattgaatatgtttatttagtttgaatggtgtaaaattgatttgaagttttgattatttttgttaattattttgttttattgatttgttaaatattgatagtggggtgttaaagttttttattattattgtgtgggagtttaagtttttttttttttttttaaggatttgttttatgaatttggtagtttttgtattgggtgtatatatatttaggataggtagttttttatgttgtattgatttttatattattatgtaatgttttttttgtttttttttgatttatgttggtttaaagtttgttttattagagattaggattgtattttttgtttttttttttttttgttttttattgttgtggtaaatttttttttatttttttatttagagtatgtgtttttgtatgtgagatgagtttgttgaatatagtatattgatgggttttgattttttatttaatttgttagtttgtgttttttaattgtggtatttagtttgtttatttttaaggttaatattgttatatgtgaatttgattttgttattatgatgttagttagttagtttgtttattagttgatgtttattagtttttttatagtgttaatggtttttataatttggtatgtttttgtagtggttgggattaattttttttttttatatttagtgttttttttaggagtttttgtaatgtaggtttggtggtgataaaattttttaatatttgtttatttgtgaaggattttatttattatttatttataaagtttagtttggttggatataaaattttgggttgaaaatttttttttttaagaatgttgaatattggtttttattttttatggtttgtagggtttttgtagagagatttattattagtttgatgggtttttttttgtaggtaatttgattttttttttggttgtttttaatatttttggttttattttaattttggtgaatttgatgattatgtgttttggggttgttttttttgaggagtatttttgtggtgttttttgtattttttgaattggaatgttggtttgttgtgttaggttggggaaatttttttggataatattttgaagagtgttttttaatttggtttaattttttttgttatttttaggtatagggataattaaatataggtttggtttttttatatagttttttattttttggaggttttgtttgtttttttttatttttttttttttaattttgtttttatattttattttataaaggtgatttttaatttttgatatttttttttttgttttggttgttgatatttgtgtatgttttatgaagtttttgtgttgtgttttttagttttattaggttatttatgtttttttttaaattgtttattttaggtagtaatttttttaatttttttttaaggtttttagtttttt

SEQ ID NO: 272 - DNA, 5312 bp, Artificial Sequence
  chemically treated genomic DNA (Homo sapiens)
gttggttttgggggttgatgattttttgggtaggtgatgtgttttgtttaggttttattttttgtgtttgtaaaatggggtggataatgtagtttaaggtagagttgtgttaaggttttttgttgttgttgggttttggtggtttgattgggtttggggtttgagtgtgtttttgggtttgggggggttgttgtgatggatttgttggtagtgttttaggattgtttggtggagtagttgttgttgttgtggatttaggtttagaggtggtttaaggtgtgtgtgtggagagggtggaatgtgggtttgtgattttgtgggttttgggatttggtatggggtttttgtttttgtgtgttatggtttgttagtgtttaggtttagtttttttttttgtagtggttttgtaggtttgtggttttatggtggggtgatgtgttttgtttaggttttattttatgtgattttaaaatgtggtggagaatgtggttgtgggatttttttaggggttttaagggtttgtgggggttgggtgtttgggtgtgtgggtgggggaggtttggtgttgtggtttataaataggtgttgttttgttattgttgttgttgttgtttttgtggttggatttgggttaggtggggttttttgttttttggtattttttggaggggtgagtgttgaggtttttagtttttttggtttatggagggttttgagtgtgttttaggggttttaattttgttgttttttgtttgaggagggaggatattgtttgtgtttgttgtggtttgatatttttttatggaataaatatagtgttggtttttgtagagttttttttgggattggggttaggggtgtttttttttgttattattttgtttgtttttttatttttaggtttttgtttatgggttttttttttatttttgttaatgaaatgttttattttgggaattgtattttttgttgtttttttatattgtatttggtaagagatagggtattgggtttttggagaaatttttgtgtttttattttgttttattttgtttttaggatattgataagtagtatgtgggttttgttatattgtttaattaggtgtattgtaagttggtgaagaaaggttttgattttatatttatggtggttggtgagtgggttaggttttttgggggagtggttggggttattggttagttaagttttgttgttggagttttagatttaatgtagttttttttttgtatttgtgtgtaggtgagttaggtttggggaagtttatattggtttatagtttttttttgatagatttgtataaggattggaagttgtttagtgttgagggtgagtggtttttaggaggttttggtattgatttttagtttttttttatgggatttttttaaggatttttttttaggtttagtttttattgttttgtttttgtggtgtgggttttttgggggtagggttaaggtattaagatggatgaggatgagggttttggttgttaagggtgaggggttgagggttggagaggtttttttagtggttttttttttgtagagtgtattagttagatggtagagattttaaaatatatggtggatattgaggagaagggagttaagttgaagtttattattgtggatatgttgggatttggggatgttgttaataatattgagtggtgagtgaggtttgttgagaaaggttttgtttaggtggttatagtatttgaggtttggttttattttttttttgtttatagttggaagtttattattgattatgtggattagtagtttgagtagtatttttgtgatgagagtggttttaattgaaagaatatttaagataattgagtgtattgttgtttatattttatttttttttttgggtatgggtgtgtggttgttttggggttaggtttgggagtgtagtttttataatatggttttttggttgtgtttatgtttatttttggttgtttttggtaggttgtggttagtggatgtgggttttatgaaggtattgtatgagaaggttaatattgtgttttttattgttaaagttgattgttttgtttttagtgagatttggaagttgaaggagtgggtgagtttgttgttgtataggggtttggttagggttttggggttgagagtattagggggatttgtttggttttaaatttgatggtttttgttttattatagatttgggaggagattgataagtttgggatttatgtatattagttttttgagtgtgatttggatgaggatgaggattttaagtagtaggattgggaattgaaggtgaatatgtagattggtggggtaggggggatggagttggtgaggggtagaattagagggttttgttttttttatattgagtttgttggaggagggttaggttagtttagttgggtgtaagagttatttgttttaggagtagaggatttgtattttttttatttagggttagaaggtaaaggttattatgtttttgtttggttggggtgggttatgtgggttttgtgtggtgtttggtaggtatggagtatttgtttagatttagaggtgtagtagtgggttaggtttttaattttaattttttttttatgggttattagaggaaggggttgttttagtggtatattttggtttttagatttttgagttttagggttggtggttttgggtgttttggtagttagagtgatgatggagattatgttaggggtaggtggttattagggtaggggtattagtatggggagatataggtttagttttggggagggaaggggtagttggagggggtggtttttgatgagggaggagatgaggagggagtatgtttggttgggtatagtttggaaaggttttggaatgtgagttatatgggttttggttttagttaggggtagagaggttagaaaggggtaatgttaggatttttttgaggagagatagttgatggtgatgttggaggggtgttttgggagttatatgtttgttttttattagtaattgtgtaattatgtttattgggtgtgagttttttttttttttttttttaggagagtgtgttttttgttgttataggtagtaatatggtggtggaggttaaggggtagtgggtttggggttgattgtatttttgggggattgtggagggtgagtagagttttggggtattaggtttggtgggggaaggttgttttgggttggtgttagtttattatttatttttattttgtagtggagaattaggtgtattgtgattttgtgaagttgtgtaatatgtttatttgtatgtatatgtatgattttaaggatgtgatgtgtgatgtgtattatgagaattattgtgtgtattgtatttagtagatgattaggtgtgtgttttagttgtgagttagattttgtttttttggttttgtttatgtttttataattgagggttggttttgttagtttatttagatttgaattttgtattattttttaagtttttttttttttttagagtttggtttttttagaattaagtttagggttgtgagggttttggagggtagggttttagtagtggtggggatgggttaggtattgttagtttatgttgagttttttggtggtgttgttttgtttatttttttttttgttttgtgtagtaaattgatttaggatagttgtatggagagttttattttgattttgttgttgtttattttggatgttgagattgagaagtttattaggatgaaggatgaggaagtatgtggggtggtgggggtggtggaggtgggtgttagggatgtttttttgtggtgttgtttatttgttgggttgtttttgtttgtagttgaggtgtatgtaggagatgttgtagaggatgaagtagtagatgtaggattagtgatgtttgttgtggatatattgtttgtttttgggatgtttttgtatttttggatattagattggattgtttttgatttggagatgtggggttatagtttttagttgattttaatttatttttagtattatttttttttaggttattgtgtttgtttttgaggggtttggattgtagtttttgtttagttggttttttttgattttgggggattaggagtgaagttgggtgggattttagagatttgttttttttgttttttttttgtttttggatggttatagtatttaaattgtaggttttgttttggtaggtaggtaaagttaggtagaagaggatttttaggattttgggtttgttttttgttttagtgttgtagaatggatttgggagtttttttttgtttgtttttgtgggttatttagtgagtgttgagattttattttttgttgaggtgggttgagtttttttttatttttagatgtttagtgggtagggttgggttgaattaaatgggagttttttagatataaggaggttagaggttgtaaggagtggggttgtgattgtttatattttttttttatagtttggtttgatttggagggtttttggggtattgggtggtgagttattttttggtaatttttggtgttgttttttgtttttgtttgaggttttttttttttagtattgttgtggtgtgttgggattttgagtttaggttttttgatgtttttatttgtatgatttttttttgttatatgatgttttgtttttttttgttgtgaatgttgtgttttgttttggtgataggagaataatgttggtgaatgttgtagtgggtgtttgagtgttttgtgtgtttttgagagtgggtgggagtggaagtttgagtggtttgtggtttttggtgatagtgtgttatttgttgttgtagtgtgtgtttgtgtggtttttgggttatttttggttaggttgtagtattgtggttggtgtgggtgtggtaggggtggggtggttttattgtttggtttttttgtttatgttttttgttgtagagtaagttgggttgttgtttttttgttatgggttttggtgagtttggagtttggttgggtttttggttgttttttaggttgatttgggttgagaggagttttggttgtttggttgtagttgggagagatttgggttagatttagaggggatttttagttggtgtgtggggtggttagggtggagaggttggtgggttattgggatgttgggtattaggggttggatggagttgggttggtagtttgggtatttagagatgttgtttaggtgtttgttgattgtttggtttattgtggtgttttttttgtagg

SEQ ID NO: 273 - DNA, 5312 bp, Artificial Sequence
  chemically treated genomic DNA (Homo sapiens)
tttgtaagggaagtgttgtagtaagttgagtggttggtgggtatttgggtgatatttttgagtatttagattgttggtttggttttatttagtttttgatgtttggtgttttggtagtttgttagtttttttattttgattattttgtatgttggttggaagttttttttaagtttgatttaagttttttttagttgtagttaaatgattagagttttttttaatttgggttggtttagggagtagttgggggtttgattggattttagatttattggagtttatggtgagaagatggtagtttggtttattttgtagtgggaggtgtaggtgggagagttgagtgataaggttgttttgtttttgttatgtttgtattgattatagtgttgtggtttggttagaaatagtttagaggttgtgtggatgtgtgttgtagtggtagatagtatattattgttggaggttgtaggttgtttaggtttttgtttttatttgtttttaggggtatatggagtatttggatatttgttgtgatgtttattaatattgtttttttgttattaggataggatgtggtatttataatggaagaaaatggagtattgtgtggtgggaagggattatgtgggtgggaatattgggaggtttaggtttaggattttggtatattatagtggtgttggggagaagaggttttgagtgagggtaggggatggtattgagagttgttaggaggtggtttattgtttagtgttttgggggttttttaggttgggttgggttgtggagaaggggtgtaagtggttatgattttgttttttgtagtttttggtttttttatgtttggagggtttttatttgatttagtttaattttgtttgttaggtgtttggggataagggaagatttggtttgttttgatagaaaatggggttttagtatttgttgggtgatttgtgggagtaggtaaaggagggtttttaagtttgttttgtagtattggggtagggaatagatttaggattttgggaatttttttttgtttagttttgtttgtttgttagagtagggtttgtggtttgggtgttgtgattgtttgggggtgggggaagggtaagggaggtggatttttgaagttttgtttaattttgtttttgattttttaaggttagagagggttagttgggtgggggttatggtttaggttttttggaaatagatataatgatttgggagggggtggtgttgagaataaattagggttagttgggggttgtggttttgtgtttttgggttgggaatagtttggtttggtgtttaggggtgtgagggtgttttggagatggatggtgtgtttgtggtgagtgttattggttttgtatttgttgttttattttttgtagtattttttgtatgtgttttagttgtgggtggagataatttggtgggtgagtagtattgtggaggagtatttttgatgtttgtttttgttgtttttgttgttttatatatttttttattttttattttgataagttttttagttttggtgtttggggtgggtagtggtaggattgggatggggttttttatgtggttgttttgggttagtttgttgtgtggggtgggggggaggatgggtggggtggtgttattgggaggtttagtgtgggttggtgatgtttggtttatttttgttattgttgaggttttgttttttggagtttttatagttttggatttggttttagggagattaggttttgggggagggggggggtttagggaatggtgtaaagtttaagtttgggtgggttgataggattggtttttagttatggagatgtgggtggggttagaggggtgaggtttggtttgtggttggggtgtgtatttggttatttgttggatgtagtgtgtgtggtagtttttgtagtgtatgttgtatgttatgtttttgaggttgtgtatatgtgtgtggatgagtatgttgtgtagttttatgaagttgtaatgtgtttggttttttattgtggggtgggggtgggtagtgggttggtgttggtttaggatagtttttttttattagatttggtattttaagattttatttattttttatgattttttaggggtatagttggttttggatttgttgttttttggtttttattattgtgttgttgtttataatggtgaagggtgtgtttttttgggggaaggagggagaaaggtttatatttggtgagtgtaattgtatggttattgatgggaaatgggtatgtaatttttggggtatttttttagtattattattaattatttttttttaaagagattttggtgttgtttttttttggtttttttgtttttggttggagttagagtttatgtggtttatattttagggtttttttaggttatgtttaattaggtatgttttttttttatttttttttttattaagaattattttttttagttgttttttttttttttagggttgagtttatgtttttttatgttgatgtttttgttttggtggttatttgtttttggtatggtttttattattattttagttgttggggtatttaaagttattaattttggagtttagaaatttgggagttagggtgtgttattggggtagtttttttttttggtgatttatgggaagagggttggggttgggggtttggtttattgttgtatttttggatttgggtaagtgttttatatttgttaagtattatatggggtttatatgatttattttagttaggtaaagatatggtgatttttattttttagttttggatgaagggggtataggttttttatttttagaataaatgatttttgtatttaattgggttgatttggtttttttttagtaggtttaatgtgaaggagataaagttttttggttttgttttttattagttttattttttttgttttattagtttgtatgtttatttttagtttttggttttgttgtttgaagtttttatttttgtttgagttatatttagggaattggtatatatggattttaaatttgttaatttttttttggatttgtggtggggtaaggattattagatttgaggttagataagtttttttggtatttttagttttagggttttggttaggtttttgtgtgatggtaggtttatttgtttttttagtttttggattttattggggataagatagttagttttggtgatgagaggtatgatgttgatttttttatgtaatgtttttatgaaatttatatttattggttgtagtttgttgagagtagttaagggtgggtataggtatagttagggggttatattgtaggggttgtatttttgagtttggttttaggatagttatatatttatgtttgaagggggagatgaagtataggtagtagtgtatttggttgttttggatgtttttttggttgaggttgtttttattatggaagtattgtttaaattgttggtttatatagttggtgatgggtttttagttgtgggtaggagggaggtgaggttaggttttgagtgttgtggttgtttaggtaaggttttttttagtaggttttatttattatttggtgttgttgatagtgtttttgaattttggtgtgtttatgatggtgagttttagtttgatttttttttttttaatgtttattgtgtgttttagaatttttattgtttggttgatgtgttttatggggaaggggttattggaagggtttttttaatttttagttttttatttttggtagttaggatttttgtttttatttattttggtgttttggttttatttttaggggatttatattgtgagaatagaatagtgggagttggatttgaaagggagtttttggagaggttttatggaaggggattggggattagtgttagggttttttgggggttatttatttttagtattgagtagtttttggtttttgtataagtttgttaggaagaggttgtggattagtgtggatttttttaggtttgatttatttgtatataggtatagagaaggagttgtgttaggtttggggttttaatgatagagtttggttggttagtgattttagttatttttttgaggagtttggtttatttattagttattatgagtgtgaagttaaagtttttttttattgatttgtggtgtatttggttgggtagtgtggtgaagtttatgtattgtttgttaatgttttggggataggatggaatagggtagggatataaaggtttttttagaagtttaatattttgttttttattaaatgtggtatgaggagatagtagagggtatggtttttagggtggggtattttgttggtaaaaataaggggagggtttgtgggtaaaagtttggagataagaaggtaggtgaggtggtggtaggagaaggtatttttggttttaattttagggagggttttgtagggattgatattgtatttattttgtggggagatgttaggttgtagtaggtataggtgatgttttttttttttgggtagagggtagtaggattgggatttttgggatatatttaaggttttttataagttggagaagttgggggttttgatatttatttttttggagagtgttagggggtgggaggttttatttggtttggatttagttgtgggggtggtggtagtggtggtggtggagtagtgtttatttatagattgtggtgttgagttttttttgtttgtgtgtttaggtgtttagtttttgtagatttttggggtttttggaggggttttatggttgtattttttgttgtgttttggagttgtgtgaggtgaggtttggatagggtatgttgttttattgtggggttgtggatttgtgaggttgttgtggagggaagggttgagtttaggtgttggtgggttgtggtgtgtggggatggggattttatgttgagttttggagtttgtggggttatagatttatgttttgttttttttatatatgtattttgagttgtttttgggtttgggtttgtggtgatagtagttgttttattaggtggttttggggtgttgttagtgagtttattgtggtgatttttttaggtttgggggtatgtttggattttaggtttggttaggttgttagagtttggtgatagtgagggattttggtgtggttttgttttaggttgtgttgtttattttgttttgtggatgtgggaagtgaggtttggatagggtatgttgtttatttgggggattgttgatttttgaggttgat

SEQ ID NO: 274 - DNA, 3025 bp, Artificial Sequence
  chemically treated genomic DNA (Homo sapiens)
tttttatgatttgatttttatagttgttttatttatgggttttttataaattaggggtatagaggagtattgaaagttagtttagaggtgagtgtgtgtagttagtgttttttgtggatatagtagttgggtgttggagaggtttggaaagggtgtgttggagagttaagtgttagttgtttagggtttgttggttgttttttttttttttgtttggtaggggatttagtgtgtatgttagtgtggaggggtgggttggttggttagttttgggttttttggttattttggggattttttttaagttttgtttttgagtgtttttattggttttggatttttttttttttagttgtttgtttgggttttggggtgtttaggttattatggataaatagtttagggtgtttggttgagaagttaggggtgaggaagttttggggtgttgttgttgttttttttaattataaattaggttggataggagagggaggggtgggggatagtgggtggggatttagattgttagtattttgttatttatagttggggtttttgagtggtagaaagttttggttattttttgttgtttgggttgggtgaaagttaggattgtgttgtgttattgttaggatatggagttattgttgttattgttttgtgatgtagatttgatggtttttgatggttttttttgtttttttgttataatggatgatttttatgatgatttgtgttttgattttttggatttgtgtttttttgaagatttggatttgtgtttgatgtatgtgggtgtgtttttgaaatttgaagagtatttgtatttttttgtggtggtgtatttggttttgggtgtatgtgaggatgagtatgtgtgtgtgtttagtgggtattattaggtgggttgttgtttattgtgggtttgtaaggtgtgtaagtgtaagattattaatgttgattgttgtaaggttgttattatgtgtgagtggtgttgtttgagtaaagtaaatgaggtttttgagatatttaagtgttgtatgttgagtaatttaaattagtggttgtttaaggtggagattttgtgtaatgttatttgttatattgagggtttgtaggttttgttgtgtgattaggatgttgtgttttttggtgttgtagttgttttttatgtgttgggtttgttgtttttgggttgtggtggtgagtattatagtggtgattttgatgtgtttagtttgtgttttaattgttttgatggtatggtaaggttgggattttaggaagtgaggaagttagggtggtgtttgggatattagggatgtgtttttgagggtggggagttggttttgtgggaggtttgggttaggattttttttgagagagaggatttttttgttttgggtagttgttattggggtagtttgttttggaagtgtgtgggtaagtgtttgagttgttttattgggggtgttattagaatattgtagtgtgaatgtgaagatttttttttttatttatttttatttttaaaatgtaaatttgtgttttttggtgattgtttgtttttggtttggttttgtatgttgtagattttattttttatttatttgtaattatttttttaattaggataggtttgggtttggaattagagttttaggttagagttagggagggggtggttataggaattggtgtttgggttttgagttgttttgtgggtttgatttagttgtttttgttgtttgtagatggattatagtggttttttgagtggtgtttggtggtggaattgttatgaaggtgtttattataatgaggtgtttagtggtgggtattttgggtttttttttgtttgtttttttttttttatggagttgttttggtttttatttaggatgtttttatttttatttatatatgtttatgttttgggaagtggtgtaggagatgaaatattaagtaagtagttttttgtttttttgattgttttggattttaattaaagtttttagtttttaatttgttttaaagtattgggtttgggggtgggaggtttgttgtggttttatttttgtttattaattgagttttttttgtgtagaatttaggtttgggaagagtgtggtggtgttgagtttagattgtttgtttagtattgtggagtgtatttttattgagagttttgtggtgtttgtttttttgttggtggatgtgttttttgagttgtttttgtgtaggtaagaggttgttgtttttagtgagggagagagtagtggtgattttatttagttattggatgttgttttgtagtgttttgtgggtgtgaattttaatttgatatattaggtgttttgaggggatggtggttgtttatttgtttgagggatggtgtttttagggttttttgtgtttaaaagattgaatttaaatgttttttttttaatagtgttttaaaagtgattttttttgaggtaggagaggtgggagaattgaagtttttgtttttgttttatagggtaaggatatagtgtggttttttttatgtagtattttttttggagatttattgtgatggttgttttgtgttttttggtgggttagagttgaattttgaggggttaggtttagtttttttgtgtttttttttatgggggtgagatttttgtagatttaattttgttttgggatgtattggttatttgggggggtgtgagatttagtgtattttggttttaaatgtagtaggtgtaattgtaatttatttttaatttgttttttggtttaggattattttttgtaatatttttgtaatttatttttgtaaataagagttgttttgttagagtaggagtttttggggttgtatttatttttgaggtatggtgtgtggtgttatagggaatttgtatgtttatattgtaggtgggtgagttgtgggtgtttgtttaggtgattaaaataaaggtgttaatttatattgttgtggttttggttttttttggatatgggtgtgggattt

SEQ ID NO: 275 - DNA, 3025 bp, Artificial Sequence
  chemically treated genomic DNA (Homo sapiens)
ggattttatatttatgtttagggaaagttggagttatggtggtataaattagtgtttttattttgattatttgagtgagtgtttgtggtttgtttgtttgtggtataaatgtataaattttttgtagtattatatattatgttttagagataaatatagttttaggggtttttgttttggtaaagtaatttttatttataggaatagattataaaagtattataaaaagtggttttgaattgggaaatgggttgggggtgggttatggttatatttgttatatttgggattggagtgtattgggttttatgtttttttaaataattggtgtattttggggtagggttaggtttgtgagggttttatttttatgggggagggtgtgagaaagttgaatttagttttttaaggtttagttttggtttattgaggaatatggagtggttattgtaatgggtttttgagaagggtgttgtgtggaaaaaattgtgttgtgtttttgttttgtggggtgggggtggaaattttagtttttttgttttttttattttaagagaagttgtttttaaagtgttgttgggaggggggtatttaagtttaattttttgggtgtgagggattttaggggtattattttttgggtgggtgggtggttattatttttttagagtatttggtatattgggttggggtttgtatttgtagggtattgtggggtggtgtttggtgattgggtggggttgttgttgtttttttttttgttgggggtggtagttttttgtttgtgtggaggtgatttagaaggtatgtttgttagtaggagggtgggtgttgtagggtttttggtggagatgtgttttatgatgttggataggtagtttaggtttgatattgttgtattttttttgggtttgggttttgtgtggggagggtttggttagtaagtaggggtggggttgtgataagttttttatttttgggtttagtattttgagatagattggaaattgaggattttagttagagtttgggataattgaaaagatagggagttatttgtttagtattttattttttgtattattttttaggatataggtgtgtgtgagtgggggtgggagtgttttagatagaggttaggatagttttatgaaggaggaggagtgagtagggagaggtttggaatatttattgttgggtgttttgttgtagtaggtgtttttgtagtagttttgttgttgggtgttgtttggggggttgttgtagtttatttgtaaatagtaagggtgattgagttaggtttgtgggatggtttgaggtttgaatattaatttttgtagttgttttttttttaattttagtttaaggttttagttttgggtttagatttgttttggttgggggggtaattatgggtgggtaggagatgaggtttgtaatatgtagggttaaattaagggtggatagttattaaggggtgtaaatttatattttggaagtagggataagtagagaaaaagatttttatgtttgtgttgtagtgttttaatagtgtttttaatggggtagtttgaatgtttgtttgtatatttttaaaataggttattttagtgatagttgtttaggataagggggtttttttttttgggaaggattttggtttaaattttttgtaaggttagttttttgtttttggaaatgtgtttttgatattttgagtgttgttttaatttttttattttttggggttttggttttattatgttgttggagtagttggagtgtgggttggatgtgttggagttgttgttgtagtgtttgttgttgtggtttgggggtagtgggtttggtgtatagaaggtggttgtggtgttagggggtgtggtgttttggttgtgtagtagagtttgtaggtttttgatatagtggatggtgttgtgtaggatttttattttgggtaattgttggtttggattgtttgatgtgtagtgtttgagtgttttaaaggttttatttattttgtttaggtggtgttgtttgtgtatggtggtggttttgtggtggttggtgttggtggttttgtgtttgtatgttttgtaggtttatagtaggtagtggtttgtttggtggtgtttgttgggtgtgtgtatatgtttgtttttatgtgtgtttggggttgggtgtattgttgtggggaagtgtgagtgttttttgggttttaggagtgtgtttatgtgtattaggtgtgggtttaggtttttgaagaagtgtaggtttggggagttgaaatatgggttgttatagaagttgtttgttgtggtaaaggagtagagagagttgttgggggttgttaggtttatgttgtggagtggtggtgatagtagttttatattttggtggtggtgtggtatggttttggtttttgtttaatttaagtggtagagagtggttggaattttttgttgtttgggagttttggttgtagatagtaaagtgttggtagtttgaatttttatttattgttttttattttttttttttttgtttggtttgatttgtggttaaggaaagtggtggtagtgttttagggtttttttatttttagttttttggttaggtgttttgggttatttatttgtagtagtttaaatgttttggagtttaggtgggtagttgggggagggggagtttgaggttaataggaatatttgggggtggggtttggggggggtttttggggtggttgaggggtttgagattggttagttagtttgtttttttatattggtgtgtgtgttaggttttttattgggtagggagggagggagtgattggtaagttttaggtggttgatatttggttttttggtatgttttttttaaatttttttaatatttgattgttgtatttgtgggaaatgttggttgtgtgtgtttatttttgagttgatttttaatatttttttgtatttttgatttgtgggggatttatgggtagagtggttgtagaaattaggttgtgagag

SEQ ID NO: 276 - DNA, 11913 bp, Artificial Sequence
  chemically treated genomic DNA (Homo sapiens)
taaagtagggtgttattaaagaaagaaggaagaaattggttaaatgaatttagaatataaataaaattattgtataaataaaatttttgtttatgattaagttggaatggtggttaaaaaagaaaagggaaaaaaaatttttagatgtaggtagatttttataattaagttattttttaaaggggaagtaaatgtgatagaatatttagtaagtaaatttattgaggaatattttgtttttatataattaaatttaatattgaggtaaaattgataattattaaattgagggtagttgggagagggaaaggggatgagataaaatttagtttataaaatattttattattttttataggttaaaaaatataaaagaaatatttggaaagaattgtttaagatggaaagattttaagattgtgtgattttttttttttttttttttttttttttttttttataggtgtagaataatttttttttttttttttgtggttttttttttttttattttttttttttgttgtttgtaaagttgaatttggggttaggagttttaattgtaattttagattggaattttagatggtgtgtttaggattggaagtaatttttagtttattaattttatgggtttatgtatttgttttggttatggtttggtttttatttttattgtggtattaatgtagaataaattgagatatattttttatataattagttttagaatttaaaaagatttatggtataataatagaggtagtgttgtggaatttttttattgaggatttttggggagtttggggattattttgtggtggtattagaatagatgagtaattttagtggttttaggtattgtgaattgggggagagggggaaattttgtattgtatttggtagtatttaatggttttgggtttttagatagggttagtgaggagagttaggatagtaagtggggattggttaaaaaaaattgatttaattttgaaatgattagaagaagttgggagtagttattataaagttttttttttgtttttttttttttttaattgaaggaatgatgttgaaatttttattgttagtgtggggttgggaattattttaaatatttgttttgtagttttgagtgggtagattttgaagagttggagttggtggggaggggaggaatagttgttgggttgttttgtgtgtggggtttggggtgtgggttttggggagaggtgttagttgaaagtttgttttttttttgtgataggtagtagtgaggttgagttattttttattatggtttgtgggttttgtgtgtagtgtggttgtttttgtttttgattgattgtagtgttttggggtgtttatttagttgtttgtggttgttgggtgatttttggagggtggtttaggtgtgtgtattggtttttggggttgtggttgtagtagtttagttttgtgttttgttagatgtagtggatagtgttggggtgaaagtaagggttgagaaatttttattgttttgtttttatttagttttgatttttttatattgtaataattatgtatttttgaggttgggatgtttgtgttttgttagtgtattaatgttatatggttttttaggggttgtttttgtttttgtattttattagttttgaagaggtagaggggtggtgggtaaaatttttaattggatgttgagagatttgggttttagtttggtgttgttattaatttgttttttgtttttaaatagtagtagtaataaaaattgtaaagttgattgagttaaaggtttatattgtttttttatttaatttttagaataattttatgaggtgggtgttagtattttattattttgtttgattagtaaggaaattgaggtttagagagattgtggaatttgtttagggttatatagttgttggttatttggtagagttgaggttttattttggggttattaattttttgttttttattgttgtgttttatagattgttttttttttggttgtttgggttttagtttttttttttgtaaaatgagaagtttaatttgtagttttttttgttaattggtggtttagattaggaatttttgttatagattttggtgttgataggggtaagaaggtgggtgaaagaagggggtgtttagttttttatagtttgtttttttttgggattttgtgaagggtgggttttgtgagttaaaggaggtataggagagtgtttattgtttgtggtgggtgaaggtgttatttgtttttgtgttaggttgtgagttttggtgtttagtttagggtgttaaggttagtgtagttggtatgttttttttggaaaattttaggttttttgtagagaatgttatttataataaagaagaggatagagaggtatggagtgttttgtgattgtaggagtatgttagttttttagtgttggtttagtgttgtttgggtttttgggtatgtggatttgttggggttgtatggagattttttgttgggtttttggggttttttgattgtggttttttagtttagtattttttttttggttttgtaggttgtagggaattttttttatttttttagttggagaagtttaagttgggtgagggggtattttggggtttgtattggtgttttttttttttttgtttttataaggattttgagaaaataaatggtagaggagagaggagttttatatttgtttggtttttttttttttttatttatttttatattttttattttggggtaaaaatttatttttgaaaaatgttggtagagatttatgtgtttttgttttatttgggttttataaatataatgatttatatttaagttagtttttttttagataattttttttttttttgttaaaagtgttaaggatggtaaaagaagaaataattttaatttttttgtttggaaatgaaagtttttggttttttataaagggttttttgttttttatagttgagttttagttaagaaaaatgatttttaagtagaaataataggtggggagaaggaagggagatatagggatttggggggtttttagggtaattggtagtgaattttgttttgagagttttttttttatttaaaaaattaaatgtgtgagttttgtgaaaggtttagggatagattgtgtgggagaggattgagtagagagtgtgggggtagtgttttgtagaatttttttttttttaataataattttaaaagtttttgagtggagatgatgtaaagttaagtagtaaaggtggtttgggaggtaagtggagggtttaagtgttgtatttttatttttagggttttttgtgtttatgggatgtgtatttttaagaagtgtgttttttgagtaagttttgggtttgtatatattttgggtttgtagttagaatttaatggtgataatgtttatgtaatgtaagttaaaaattaaagtgtaaaaaattattatgttatttattgaaatgttattttttgttaaattgtaattattttgttttatataagtttggttggaaagtttgtagttttagtttgggttagttaggtataggaggttggattgtaattggttgttttttttttgttgtgtttggttgttttatgttgtgttgttgttgttgttttttggtgtttttgggattttatatgtatttttgaaatatgttttgttttggtttttggtttttttttttgtttaggggttgttttttaatagatattgatttttttagaagatttaaaaattaaattaaaatattttttatttgttttaaatatttgttttggggtgtgggggttgttaaatagagattagatgaagggagttagatttagtgaagttttttgagtttttaaagatttgaatattaatttgtgtttgtgggttgatggaggttttttttattttattttttggtttttttaattggtttttgttttttggttaattattgagtaattagaatggtatttttgattagggttataggtagtgtttggtggagtggttttaggagttatttgttttttgttgggttttgtatttaaatttttttttttattttttttttttaaattgggtgttaggatgttttggttggaatatatgtaggttttgggtgtttgtttaagggttttttttttttttaaattagttgttgtttttttggtttaattgtagaagaattagatattttttattggaaagggaaattaagtgttgttgattttaattttaggtaggtggtaattgttttttgtttggtgtaaattttattaagtaaataattattagttgattgaaatatgtttggtttataattggtgtaatttttggttatttaattgagggatgtttgtttttagttttgatttttggaatttataaagggttatttttttttttagtgattttaagattatggttatttttttatttgatagttttagaagtaagagttagatttaagggtgtaaagtaagggtatatgtttttttgaagtttgattgagttttttttgtgtttttttgaagtttttgtttttttggagtttatttgtttttttttttaaattatttttttagattaataattttatttttatttttattgtatttgattttgtttggatttattgtttatttgaatggattttttagtgagatgaggtttttatattggtgaaggttaagaaggggaggtggggggagggttgtgttatattggttagttgagagtgtgtgttgggttgaagaggagggtgtttttgagagggatgtttttttggatttgtttttattttagttgtgagggtgtttttaaggagtagtgtgtgttgtttggttgggtttgggttgttgagtgaatggagtggttgagttttttggtttttttttttttttgtgttgttggttttttttatttgagttttgggaagttgagggtagttaggtagttggggtaaggagtttaaggtagtgtttatatttgggggttttttgtaatttgattgtttgtttgtttttttattttttgtttttttttttatttatttatttatttatttatttatttagagttgggatggtagtttaggtgtttgggttttgttgtttttttgttgtgattttggatttttttttgttgtaggatttggtttttatgtgtgttttggagttggtgttttagtatatgttttgttttgggtttgggtgtttatagtagttagagtagtagggagtttgggatttgggtggtatttgggttaagttaggtgttgttgaggttagtgttgaatgtttttagggttggaggagttgtggggtgtttgggtttgagttgtagtaaatgggttttgatgtgtgggatttgaatgtgttgttgtttgttgttttttttttgggtggtggtggtggttgtgttttgtttgtgagtggtgtggtgtagtgggtgttggtgttggattttgtgtttttgggtgttttggtttatgggttgttgggtggttttgtgttgttattggttttgttgttatttttgttgttgttgttttatttttttattaaataggagttgagttggggtggtgtggagttgtatgaggagtagtgtttgagtgtttttattgtttatttttttggttagtttattggtatagttggagtttgttgttatgggttttttggtttttttttgtttagttaggtgttatttggttaggttaggatgttttttaatgtgttttatttgtttagttgttttgagagttagtttgttatttgtaattagggtaagtaggttggggagtgttttttatgtgtggggtagtggtgttagggattttttgttttaggatattttttttttttattttttttgattgtagtttttatttagttgttttttaagggttgtgaggatagtggaagtggtggttggggaggaggttggagagtgggagtgtatgtaggtattggtttttgatattttttaaagttaggtagagttaggagtttgattgtttgtaagagttgggagggtgtttggggttttttagagtttgagagattttgggattgttagtttttatgggagtggaattaggagattggtgtagtgtttggttttgttttggggagagttttgttaattaaggaaatgttaaattgttattaagtgtagtgttttttagatgtttggattttggatttggagtgggattagtgtgggggtgagtgtttgtgttgtgttgtttttgtagtgttaaaatgtttaggagtatttttagtttttataatatggtgttggtatatatttaggtgtatattaagtattgtagagaattagaatgagtatatgtatttttagtaattaaatggttttttggaatagtgttgtgtttgtggatagtttttgtgtatggtaatatagaagtggatttttattgggttttgtttaggtggtggttatgtaggttttggggatggaagagaatttgatttatttgagtttaagttatgtgggattaggttttattgtaggtagtggaaggaggtatgagttttggttttttttttagtgtatttggggtgtttttttattttgtaaatgtggggtttagttgggatagtatttttttaagatttggggttagaataaggatagggttatttgttgtgtttagttaggatataaggagggaatttggtatatgataagtattaggttggttttttattttgtgttgatgtttgtttattttttttttgtttgggtggtgtggatttgaatttgtggagtttttgtagtttgttttttttatttatttttagtggatttttatgttattgagaatttaagttagtttggtttgatttggtaatttagtaaatgttttattaatataatggtggatgttttttttggagtaaaattatttgagggtttagggattgggatgtttttggaatgtgtgggaagtagagtgtattttttgtaggaggtatttttgtttaaggtttgggagaagggttttgtttttgttgtttgtttttatttgtgttttttaaatgtgtgtttttaggttgtttttattttagtttaattaggagtatttggtttttgtgaagttttggagaaattgaaattgtttttttttttgggagaatttgggattattgttttgtggaggaattgtaagtagatttaagggttgtttttattttatgtttttagttagtgaaattagtgttttgtatttaaggggtgttgggataatttattggttgttgaggtttgtgttttttgattagattgtgttatttttgtttagtaggttggtgttatttttggggagtttttaggttttagtgtttttgtttataagaggatagttgagatgggtaatttggagattgggtttggtttgaagttatattttatagatgtagaagtgttatttattatttttttggggttttaaatatggaatttggtaatttatttaaatatttgtgattgagaaataatgaatttgagagtattgtttgtatgtgtgttatttggaggtggttgagaaattattgaatttatgtttttggggtataaaatattattatgttattatttttttagtatttttaggggatttttgaaatttgggttttgttgttttgtttgggttttttgtttagttttttttagggtaggtttggtgtttgggattttattatatgttgtggggggtgggattgtgggttttgtagttagtaggtattatatttttggaaaatatttggatttttttgtaatatataggtgtggttgttatggagaaaaagttaaaaggggattaggattagtaggtgaatgtattttttttttttattttggagaaaaagtttaatggagagagggttttagatttaagttatatagtttggaagtattatttttaggtttaagttttgttttgtagtgaaaatagatgggtttattttatttagtttttgaggtttattgggtagtttggatgtgagaagtgttttggttgttattttggagtgggtaagggtggtttttgagattttgggtttattttttggatttttagggtttttgttgtttttttaggaatgtagggtttggtttaagatttgggttgtgagaggtaagggtattaatttttaaaaatgtggaaatggttattagagtgttaaggttaaattttaggggagaggaattaaggttgtttttggatttttagggtagtttagttatggtgtataggtaggggtaattgttggtatttatttataattgtttaaaattttataagtatgtttatattttaaatttttaaatattatattttgtattttaattttgtaaatattaatttagtaaatattaattgtttatttggttaggtattgggttttgaatattaattaagataatggttttgagaatttttgtaagaagtttattagttaattttggagaggttttttgttttggatgaggaaatttaggttttatgagattaggtggtagaggtgggatttgaatttagattatgttagggtgtttttattttttttttagggattttggttttattgttgagatggattttttttggtttgtgggaggggtattaaatttttagtttatgtgtgggggttgatgggtttgtgagggtagatgtggggtgaggatttgagtagttttagattagatgtaaggtttaaggaggaggggaaaaaagtttgtttgggttggatgtggtggtttgaggtggttggattatttgaggttaggagtttgagattagtttggttaatatggtgaaattttgtttttattgaaaatataaaaaaaaaaattggttgggtttggtgatgggtgtttataattttagttatttgggaggttgaggtataagaattgtttgaatttgggaggttgaggttgaagtgagttgagattgtgttattgtattgtagtttgggtgatagagtgaaattttgttttggaaaaaaaaaaaaaaaaaagaggttgtttgttagtttattgattttgtagttttgtaggtttgtagaattttaaggtatgattaggtttgggattattaggttattttagggttaggtgtggaggtttgtgatgtttgagggttaaaggtttttttttttggttatataggagagggtattttgttgggggataggttttttttaattatagtgtagttgtagttattgtttttagttttttgagtatttttttggttgagtttgttgtttattttattttttagtttttatggtttggttaggttaggtggtttttggtttttttgtagttgttggtgggggaggagggtatagagtgtgttttgttttttagtgtatggttaaggttgtgttttttttttgggttgggattaattgtgggaaaggtgttattttggttatttgattttttttttttaaggtttgtataaggagtttttgaatatgttgttttttttagttggtagttttattttttttggtttttgtttttgtattttttgtgttaggttaagtgttgggtttagggatagtgtgttttaattaaatttgtgtttgataagtttttaattaaaagagatttttttttgttttgtaggtgtttttattattgttttttttggggggatttgaaggagagggtttgaggttggtttttgtttgttgaggtttgtgtgtttggtttgggaggaggtttaggagggtttgtgggttatgggtatttttgggtttgagttttggggtgtggatggatgttttgagagtgggtgttgtgatttgggatttatggtttttgttgggtatggatagttgtggagtagggttttgaggattgtgtagtgttttgggtttttgtttatttttgggtttaggaatggagaagggtttgtttagagaaaatttttttgtagtttttattttgtttttttttttttttttttttttttttttttttttttttttttttttttttttttttttgtgtttgtttttttttttttttttttttttttagtgtttttttagaaatttggtttttattttgggtaatagtgggtgttttgagttaaattttgtttgtaagtttatttataggttttaaagaaggttaggttttaggttttaaaaggaagtttgtggaagtttaaatgtgtttgtttatgtaggagagttaatggggttgggggttatttttgtttatttagtaggagagaaatggaggtttttgaggttatatgataaaagttagtggttttttaaatttttagtgtgtggtgttgagtagtgtgtgagatttaagtttggatttgtattatttgggagttaggatttgtttttttttttttttttttgtattttgttatattattttttaggtttatgtttttgttgttttagagaagttttttttttttttttttttttttttttttttttgggtggggggtggtggtgtgtgtgtatgagtgtttgtgtgtgttttgaaaatggaggtaatgatgttttgggttttgtttattggttgagttttgtttaagtttttggaggtattttggttaaatagtgtaagagtgggagaatgggtgttgtttgatttaatttatttttgagaattttgtgaagtttggagatttagggtagttttgggttaggaggatttgaggttgttggggtggttttgttaggattttataggagtagttttttttagttattgtgtttggattttaggttatagattttggaatttgtagaggaatgagattttatttttgggttttggggttaatgatgtatttttagttgaaggatttttttttttagaggtagtaatagttttttagaagtttgtggggtataagtttaaagtaatttaataataaaaattataaaagattatgttttttaattgaggttttatgtttttttttttattttgggggggggggggaatgttaggatttttttagggggaaattgaggtaaaggattgaagtattattatggagggaaagggagatatagtgttaggtatattttaaaggaaattggttgtttagtttggggagtgaggaagttggtttttatagtagtggttagggttggatttttgggtgtaaggtgggttttataggggggaggaggaggagagtgtagggttgttatttgaaggtttaattggaaggggtttttgtttttttttttattagtttttttttgggtgttatggtgttaggttgggtagttttagatagataatattatttggtaattattttttttatttttaagattaggttatttaattggttttgagtaattaatgaaagttggtgtgtgggtttttgatttatagtttggagttaatgtggggttagtttagtagatttattttgtttgtttgtgttgtttttgtggaagagttgtagtttatttttggggggtgaataattttttttgttgattaggtaatgagttttatatttaatttgttaggggtttgttgtagaagtggtagagattgtagaagattgtggtataaataaattgggaaaaagtgaggtgggggttttagttagaaaaggatggagaagtttgttttaaggttatatttagggatttgggttgtttttttgttgaaagttttggaggtttgtggggttggatttttttttgttgggggtttgaatgtggggtttagtgtatattttttttgtttgtggttggtttagatttattgttttgttttgtgagagtattgttgatattgtgtttttttttgttgtttttgtagg

SEQ ID NO: 277 - DNA, 11913 bp, Artificial Sequence
  chemically treated genomic DNA (Homo sapiens)
tttgtgggagtggtggagagaagtatagtgttagtggtgtttttgtaagatggggtagtgggtttgaattagttatgggtggggggggtgtgtgttgaattttgtatttggatttttagtggaggagaatttagttttataagtttttaggatttttggtaggaagatggtttaagtttttggatgtgattttgggataggtttttttatttttttttgattaaaatttttattttgtttttttttaatttatttatgttgtagttttttatggtttttgttgtttttgtagtgaatttttggtaaattaagtataaaatttgttgtttgattgatagagaaggttgtttattttttaaaaataaattgtagtttttttgtaggagtagtgtgggtaagtgaaatgaatttgttgggttaattttgtgttgattttgagttgtaaattaggggtttgtgtattaatttttattaattatttggagttagttaaatggtttggttttaaaaatgggaagagtaattattgagtaatgttatttgtttggggttatttgatttgatattatgatatttaagggaaagttggtgagggggaaaataagggttttttttagttgggtttttagatggtgattttgtgttttttttttttttttttttatgggatttattttgtgtttaggggtttgattttgattattgttgtaggagttaatttttttattttttaggttggataattaattttttttagagtgtgtttgatattgtatttttttttttttttatggtagtgttttggttttttgttttagtttttttttagggaaattttagtatttttttttttttttaaagtgagaaaaagagtgtggagttttagttggaaaatatagttttttataatttttgttattaaattgttttaaatttatattttataagtttttggaaagttgttgttgtttttggggaaaaggattttttggttaaagatatgttattggttttggaatttaaggatggggttttatttttttataagttttggagtttgtggtttgaagtttagatataatggttaaggagagttgtttttatgggattttggtagggttattttagtagttttagatttttttggtttaggattgttttgggtttttaaattttataaaatttttaggagtaaattgggttaaatagtatttatttttttatttttgtattatttgattaaagtgtttttaaagatttaagtaggatttagttgatgagtaggatttagggtattgttatttttatttttgaaatatatatggatgtttatgtatatatattattattttttgtttagaaaaaaaaaaaaagaaaaagaaaaaaaaaaagtttttttggggtaatagaggtatgagtttggagggtggtgtggtagagtgtaagggagggaaggagggggtaaattttaatttttggatagtataggtttaggtttaagttttatatattgtttagtattatatattggggatttgagaagttattagtttttattatatgattttgagggtttttattttttttttgttaagtgggtaaagataatttttggttttgttagtttttttgtatgggtgagtatgtttgggtttttatagatttttttttgaaatttgaggtttggttttttttgaggtttatagatgagtttataaatgaaatttggtttagggtatttattattgtttggagtgaaggttgaatttttgaaaggatattaaaaagagagagagagaaagagagatagatatagagagagagagagagagggagggagagagagagagagagagagagagagagagagagatgaaatagaagttatgaagaagttttttttagatgaatttttttttatttttgagtttaggagtaggtagggatttagggtattgtataatttttagagttttgttttgtaattgtttgtgtttggtgagggttgtgggttttgagttgtggtatttatttttgagatgtttgtttgtattttagaatttgggtttaaggatgtttgtggtttgtgagtttttttaggtttttttttagattggatatgtagattttggtgggtaaagattggttttaaatttttttttttaggtttttttgggaggggtagtggtgaaagtgtttgtggagtggagggaggttttttttaattagaagtttattggatatgggtttgattagagtgtgttgtttttgggtttagtgtttggtttggtgtggagagtgtgggggtaggggttaggggaggtaaagttgttggttggaaggagtagtgtgtttaaaggttttttgtataggttttggagggagagaattgagtggttaaggtagtgttttttttatggttagttttggtttgggaggggagtgtaattttgattgtgtgttaagaggtgagatgtgttttgtgttttttttttttgttggtggttgtagagaagttgggaattgtttggtttggttgggttgtgagagttgaggggtgaaatggatagtaggtttagttaggaaggtgtttagaaggttgaaaatgatgattgtagttgtattgtgattggggaaaatttgttttttaataaaatatttttttttgtgtgattggaagagggagtttttggtttttgggtgttgtaggtttttgtatttgattttagggtggtttgatgattttaggtttaattatgttttagggttttgtgagtttgtggggttgtgggattagtggattagtaggtaattttttttttttttttttttttttgagatggagttttgttttgttgtttaggttgtagtgtagtggtgtgattttagtttattttaattttagttttttgggtttaaatgatttttgtgttttagttttttgagtagttgggattataggtgtttgttattaagtttggttaatttttttttttgtatttttagtagagatagggttttattgtgttggttaggttggttttaaatttttgattttaggtgatttaattgttttgagttattgtgtttggtttaagtaagtttttttttttttttttttaagttttgtatttagtttggggttatttaagtttttattttatatttgtttttataaatttgttaatttttatatatggattaagagtttggtgttttttttgtaggttagaagaaatttattttaatggtggggttaagatttttggaaaaggagtagaaatattttagtatggtttgggtttaaattttatttttgttatttaattttatagaatttggatttttttatttaaaataaggggtttttttaggattagttggtgagttttttgtaaaggtttttgaggttattgttttaattaatatttagaatttagtgtttgattaagtaggtgattgatgtttgttaaattaatgtttataagattaggatgtaagatataatatttaagaatttaaaatatgaatatgtttgtgaagttttgggtggttgtgagtgggtattaataattgtttttgtttgtgtattatggttagattgttttagggatttagagatggttttgattttttttttttggggtttggttttggtgttttgatggttatttttatatttttgagagttgatgtttttgttttttatagtttaagttttgggttaggttttgtatttttggggaagtagtaggaattttggaaatttaaagaataaatttagaattttgagggttatttttgtttattttaggatagtagttggagtgttttttatatttaagttgtttaatgagttttaagggttgggtaagatggatttatttgtttttattgtaagataaaatttaaatttggagatggtgtttttaggttatatgatttgaatttagggttttttttttattgggttttttttttagggtggagaagaaggatatatttatttattagttttggtttttttttaattttttttttatggtagttatgtttgtatattatagaagaatttagatattttttagaagtgtaatgtttgttggttgtaaaatttatagttttattttttatgatatgtgataagattttaggtattagatttgttttgaaaagggttggataagggatttaaatgaagtgatagaatttaggttttaaaaattttttagaagtattaaaaagataatggtgtagtagtattttgtgttttaggggtatggatttgatggttttttaattgtttttaaatagtatatatgtagatagtgtttttggatttattgttttttagttatagatgtttagatgggttgttgagttttatatttaaagttttaagagggtggtgggtagtgtttttgtatttatggagtataattttaagttggatttaatttttaggttgtttattttagttgtttttttatagatggggatattgagatttagaaattttttaaaagtaatattagtttgttaaataaaggtggtgtgatttgattaaagaatataagttttagtgattagtaagttgttttaatgttttttgagtataaaatattaattttattaattaaaagtatagagtggaggtaatttttgggtttgtttgtggtttttttataggatagtgattttagatttttttgaagaaaagggtggttttgatttttttaaggttttgtgggggttgggtgtttttggttaggttaaggtaggagtggtttgaagatgtgtgtttagaaggtgtgggtgaaggtgggtaataagggtagagttttttttttgagttttgggtgaaggtattttttgtaaaagatatattttgttttttatgtattttaaaaatattttggtttttaggtttttgagtaattttgttttaggaaaagtatttgttattgtattagtaaagtgtttattaaattattgaattaaattgaattggtttaggtttttaatagtgtggaaatttattgaaaataaatgaagagggtaaattataggggttttgtaggtttgggtttgtgttgtttaggtgaaagagaggtgggtgggtattggtgtgggatgagaaattaatttgatatttattgtgtgttgagttttttttttgtattttgattaagtatagtgaataattttgtttttgttttaattttaggttttgaagaaatattgttttagttgagttttgtgtttataagatgaagaggtgttttagatgtgttgaaagaaaggttaaagtttgtgtttttttttattgtttgtggtagaatttggttttgtatagtttggatttggataagttaagtttttttttatttttagaatttgtgtggttgttgtttgagtgaagtttagtgaagatttatttttgtattattatatgtgggagttatttatggatatgatgttgttttagaaagttatttagttattggaggtgtatgtgtttattttagttttttatgatatttaatgtgtatttaagtgtgtgttaatattgtattataagggttggaggtgtttttggatattttagtgttgtggaggtagtatagtataggtgtttatttttgtgttggttttattttgaatttagagtttagatgtttgaaaagtgttatgtttggtgataatttggtgtttttttaattaataaaattttttttaaggtagagttagatattgtgttggttttttggttttatttttgtggggattagtagttttggaattttttggattttaaggggttttagatgtttttttggtttttgtgaatagttaggtttttagttttgtttggttttggaggatgttgggggttagtgtttgtgtgtatttttattttttggttttttttttagttgttgtttttgttatttttatggtttttgggaagtagttgggtaagagttgtggttaaaaggggtaggagaggggggtgttttagagtggagagtttttggtgttattgttttgtgtgtagggggtgttttttggtttatttattttgattgtgaatagtgggttggtttttgaggtagttgggtaggtagggtgtgttaggaaatattttggtttggttggatgatgtttggttgggtggaggaggattgaagggtttgtagtgataggttttggttgtgttagtgaattggttggaaaagtggatagtgaaggtgtttaggtattgttttttgtgtggttttgtgttgttttagtttggtttttgtttgatgaaggagtgaggtggtggtggtgggggtggtggtggagttggtggtggtgtggggttgtttaatgatttgtaagttgaagtgtttgggggtgtaaagtttagtattggtgtttattgtgttgtgttgtttataggtagggtatagttgttgttgttatttagggaggggatggtgggtagtagtgtgtttaggttttgtatgttggagtttatttgttgtggtttagatttggatgttttgtggtttttttggttttggagatgtttagtgttggttttggtggtgtttaatttggtttagatgttgtttgggttttggattttttgttgttttggttgttgtaggtatttaggtttggagtggagtgtgtgttgagatgttggttttgggatatatgtggaagttgggttttgtagtaagaggaagtttaggattgtggtgaggagatggtggggtttgggtgtttgggttgttgttttggttttgggtgggtgggtgggtgaatgagtaggtgggagggagggtgggaagtgggggagtggataggtggttgggttgtggagagtttttgggtgtgggtgttgttttgaattttttattttagttgtttggttgtttttagttttttaaagtttaaataagaggggttggtggtgtggggaagaggaggagttaggaggtttggttgttttatttatttagtagtttaagtttggttaggtagtgtgtgttgttttttgggggtgtttttgtagttggggtgagggtgggtttgagggagtgttttttttggagatatttttttttttaatttaatatgtgtttttagttggttggtgtggtataattttttttttattttttttttttggtttttgttagtgtgggagttttgttttattggagagtttgtttaggtaagtagtgagtttgggtagggttgaatgtggtgggagtagagatggggttgttaatttaaaagagtggtttggagggaggggtaggtaggttttaagagggtgggaattttaggaaagtgtagaaagaatttagttaagttttaaagaagtgtatatttttgttttgtatttttgagtttggtttttgtttttagaattgttgggtaggggagtggttatgattttggggttattggggaaagaggtggttttttgtgggttttagaggttgggattgaaagtgaatgttttttagttgggtggttgggagttgtattagttataagttgggtgtattttgattggttagtagttgtttatttggtgaggtttgtgttaggtggaaggtggttgttgtttatttaaaattggagttagtagtatttagtttttttttttagtgaggaatatttaatttttttatggttaagttgggaaaatagtggttagtttaggagggaagaaaatttttgggtaaatgtttaaagtttgtgtatattttggttggagtattttggtgtttagtttggggaggaggggtgaaggggagggtttggatatgaagtttggtagggagtgggtaatttttggagttattttgttgagtattgtttgtggttttggttgaggatattattttggttgtttagtgattgattaggaggtggaagttagttaaggggattaaggagtggagtagggagaatttttattggtttatgggtgtgagttagtgtttgaatttttgggagtttgaagagttttgttaaatttgattttttttgtttagtttttgtttggtagtttttgtgttttagagtaggtgtttggggtgggtagggggtgttttggtttggtttttggattttttaaaggagttagtatttattgggaaataatttttaggtaaggagaagaattgggggttggagtggagtgtgttttagaggtgtgtataaaattttaggggtgttaggaggtagtagtgatggtgtagtgtgggatggttaggtgtgatgggagggaagtaattggttgtagtttggttttttgtatttggttggtttgggttggggttgtaagttttttagttaaatttatgtgaagtaaagtagttgtagtttgataaagaatggtgttttaataaatgatatagtaattttttatgttttggtttttagtttgtattgtataaatgttgttgttattaaattttggttgtggatttgaagtgtgtgtgggtttaggatttatttgaagggtgtattttttgggaatgtgtattttgtaggtgtaggagattttgagggtaaagatgtggtatttgagttttttgtttgttttttaggttatttttgttgtttgattttgtgttgtttttatttagaagtttttaaaattattattaagaaaagaaagattttataagatattgtttttatgttttttgtttagtttttttttatatgatttatttttaaattttttgtggggtttgtgtgtttggttttttgagtggagaaaggatttttgagataaaatttattgttagttgttttaagaattttttagatttttgtattttttttttttttttttgtttattatttttatttggaagttgttttttttaattaggatttaattgtgaggggtgaggagttttttatgaaaagttggggatttttatttttaaatgaaaagattgagattgtttttttttttattatttttggtatttttagtggggggagaggaggttatttgaagggaggttggtttgaatgtgagttgttgtgtttgtgaaatttaggtaaggtaaagatatgtaaatttttgttaatattttttaaaaataagtttttgttttggggtgagggatgtaggggtggataggaggaaaggagagttaagtaaatgtagaattttttttttttttgttatttatttttttagaatttttgtgggggtggggaggggaagagtattggtgtgaattttggggtgtttttttgtttgatttggatttttttgattaaagaggtgggaggagttttttgtagtttgtggggttaagaagaaagtgttaagttgaggagttgtagttggaggattttagggatttgataggaagtttttgtatgattttaatggatttatatgtttggaagtttaggtgatattaagttagtgttggggaattgatgtatttttgtagttgtagggtgttttatgtttttttgtttttttttttgttgtgggtaatgttttttgtgggagatttgaggttttttaagggggatatgttagttatattggttttggtgttttgagttaagtattaggatttatagtttagtatgaaggtaggtagtatttttatttgttgtggatgataggtgtttttttgtattttttttagtttgtgaggtttgttttttgtgaggttttagagaaaagtaggttgtggaaaattgggtgttttttttttttatttatttttttatttttgttagtgttgagatttgtagtagaggtttttggtttgaattattgattggtaaagaaagttgtagattaaattttttgttttatagagaaggaaattgaggtttagatagttgaaggagaggtagtttatggagtgtagtggtaaagagtaaggggttggtggttttagaatggaattttagttttgttaggtaattaatagttgtgtgattttagatgagttttgtagtttttttgagttttagtttttttattggttaaatgggataatgggatattagtgtttattttatagagttgttttgaggattagataggagagtagtgtgggtttttgatttaattaattttatagtttttgttattattattgtttaaggataggaaataagttagtggtaatgttgagttgaaatttgggttttttaatgtttagttggaggttttatttattatttttttatttttttagagttaatgggatgtagaggtgaggatagtttttggaaaattatgtggtgttgatatattggtaaagtgtaggtattttggttttgaaggtgtataattattgtaatatgaaaaaattgaggttgggtaggagtagggtagtgaggattttttaatttttatttttattttggtgttgtttattgtatttgatagagtgtggagttgggttgttatagttgtaattttagggattagtgtgtatgtttgggttgttttttgggagttatttagtggttgtggataattgaataaatattttaaagtgttgtggttggttaagggtggggatagttatattgtgtgtggggtttgtaggttgtaataaagagtggtttgattttgttgttgtttgttgtgggagaggaataagtttttgattagtgtttttttttggggtttgtgttttgagttttatgtgtaagatagtttaatagttgttttttttttttttgttgattttaattttttggaatttgtttatttggggttgtagggtaagtgtttaggatggtttttagttttgtgttggtggtgaaaattttaatgttatttttttaattaaaaaaaggggggggtaagggaggggttttgtgataattatttttagttttttttgattattttaaaattaagttgattttttttaattagtttttatttattgttttaattttttttgttgattttatttgggagtttggaattgttaggtattgttgaatgtggtgtaaaattttttttttttttttagtttgtagtgtttggagttgttggggttatttgtttgttttgatgttattgtgagatggtttttgagttttttgagagtttttagtgaaaggattttgtggtattgtttttattattatattgtaaatttttttaaattttggaattaattatatagaggatatgttttaatttgttttgtattaatgttatagtggggatggaggttaggttgtggttagagtagatatgtaggtttatgaaattgatgaattgagagttgtttttagttttgagtgtattatttggaattttagtttgaggttataattagaatttttgattttagatttaattttgtaaataataggggaaaaaaatggggaaaagaaaaattatgagagagggaaaaaaaattattttgtatttgtaaaaaaaaaaaaaaaaaaaaaaaaaaaaaaaaagttatataattttaaaatttttttgttttagataattttttttaagtattttttttgtgttttttaatttataaaagataatggaatgttttatagattggattttattttatttttttttttttttttaattgtttttagtttaatagttgttagttttattttagtgttgaatttaattatataggaataaaatattttttagtaaatttgtttgttaaatattttgttatatttattttttttttgagaaatggtttaattatagaaatttatttgtatttaggaattttttttttttttttttttttgattgttattttagtttaattgtaagtagagattttatttgtgtagtaattttatttgtgttttaaatttgtttagttaattttttttttttttttttagtaatattttgtttta

SEQ ID NO: 278 - DNA, 4316 bp, Artificial Sequence
  chemically treated genomic DNA (Homo sapiens)
ttgtagttaataaaaaaaaaaaaagaaagaaagaaattggtttttgttttattttatatgtttaggtataatttttttagagaagaagaggaggggggtggggaggagtaggaggaggaggaaagaaggaggagaaggagaaggagaagaagaggaagaggaagaggaagaagaagaagaagaagaagaggaagaggaagaggaagaagaagaagaagaagaagaagaagaagaagaagaagaagaagaagaagaagaagaagaagaagaggaagaagaggaagaagaagaaattgtttttagatttttatttttaggataagtttattgtttggtattaagttttttggggtgaatttttttttaaaagagtttggggagtttaggtatggaatgggaggtagaaagtttaattaagggattgggattttggaatgaataatgaagggagatggattgggtttatgttgaaggtttttttttggttttttagtttttgggtgaagatttagggagatattgagatatattttgtataggagggggagggggagggggagggtaaagttttagggttttaggagtggtttttaagggtttaggttttgaggtggtgtttggggttggaaggtttagtattgagaattttttatttttttagagttttttttttttttttaatttgtgttaggttttttattttggatatttataatgtggttttattttttatttttattgggtgttgtgtttttagagaagttaattagtgttgttgtagtttttaggttttaaagttttatgtattttgtgggatttatattttttttagatgtggaggttggggttatggtgttttgaagtttttttttgttgtttttaggggttttggttttgattgatatttgggtgggtgagtgtggggtttagagagaaatggtttttgtggggaggagtgaggggtttgtttggtgggggtgtaggatttagggagttgtgtttggaggagggtttggtgggttttattttttttttgtttttaggtttttattttttgaggtattttagtattgttgtgttgtggtttggttgtggggagttttgttatattgttgtggagtatgtagatgatatgtaatttttgtggtttgatagtgatgttgtgattttgaggatggagttgtgggagttgtgggtggagtaagaggggttgtagtattgggagtggattatagggtatgttaaggttaatgtatagattgattgagtggttttgaggaatttgttttgttgttataattagagtgaggttggtgagtgaatttggttgggggtgtaggttatgattattttttatttgttatggattgtttgggtttttttgagtttttggatttgaaatttattttgaggtagtggatttgtttagattttttatttgggagagttttaggtgtttttattgaggtttatttttagtttaggttaaaatttttgtgggttgggtggggagggggtggggttagttgggtggggttgattgtggggattggttagggttttatattttttagggaatgaatggttgtgatatggggtttgatggatgttttttttgtgggtattattagtatgtgtatgatggtaaggattatatttttttgaatgaggatttgtgtttttggattgtggtggatattgtggtttagattatttagtgtttttatgaggtagaggaatatgtagaggagtttaggatttatttggagggtgagtgtttggagttgttttgtagatatttggagaatgggaaggagatgttatagtgtgtaggtattaggggttatgggtgttttttttattttttgtagattttttgggatggttttgtataaggttgggaggaaagtgggtttaatgttaggatattgttttttttttagttttgagtaggaagaatttttttggtttttgagatttggtattagagagtgattgtgagagtttgttttgttttttgggataattaagggatgaaatttttgagggaatggagggaagatagtttttggaatattgatttgtggttttttttgagttttttaatagttttgggttttgtgattttttttttaagttttgttttttgttttatatttaatgtgtttggggttttgattttagttttttggtttttatttaggttagggttagaagtttttgttttttatttagagatttgaattttttaaggaataggagatttttttaggtgtttgtgtttaggttggtgtttgggttttgtgtttttttttttattttaggtgttttgtttatttttaggttggttatatgggtgttgttggggttttttatgaggagtgtaaagtgtttgaattttttgattttttttagattttttaaaggtatatgttgtttattattttatttttgattatgaggttattttgaggtgttgggttttgggtttttattttgtggagattatgttgatttggtagtgggatggggaggaatagatttaggatatagagtttgtggagattaggtttgtaggggatggaattttttagaagtgggttgttgtggtggtgttttttggagaggaatagagatatatatgttatgtgtagtatgaggggttgttttagttttttattttgagatggggtaaggagggagatgggtaaagaggggaatgaggggttatgtttttttttagggaaagtaggagtttttttggagttttttagtagggttagggttgaggtttggagattagggttttttatttttttttttttttttagagtagtttttttagtttattatttttattgtgggtattgttgttggttttgttgtttttggagttgtggttattggagttgtggttgttgttgtgatgtggaggaagaagagtttaggtaggaaggggtgaggagtggagtttgagtttttttgttttattgggggttgtaagttttaagtagaagtgtgttttgttttattattgggaagtattatttatatttatgggtttatttagtttgggttttgtgtgttagtatttatttatttgtaaagtttttgtgaaaatgaaggatagattttttattttgatgattatggtggtgatgggatttgattttagtagttataaattataggggaaggtttttgttgatgatagattttaggagggtagttggtttaggatttatatttgttttttttatattttttgattttgttttggatttatagttatatttttttggaaatttttttgggattaaagattaggggtttgttttaggattttatggttttgttttttttttggttttttataggatattttttttttatagatagaaatagagggagttatttttaggttgtaggtaagatgaaggaggttgatttttgagattgttgggatattgtggttaggagtttatgagggagtttatttattttatagtttttttagttatatttgtgggttttgattaggttttgtttttgttttattttaattattgatagtgtttagggttttggggtgttttttatagttaataaaggtgatattttagggtaggggttttgatgtgagtggggtgttgggggggaatagaggggatttagttgtgttattgggtttttttgatttggatgttttgagtatgaaatgggttatttagagtgttattttttattgtgattgatatgaatttgtttatgaatattttttttatagtgtgagatagtttttttgtgtgggattgagaagtaagatattaatgtagtagaattgtatttgtgttttatgaatatatataaattttaaaaataaagaataaaaatatatttttttatagatataggtagatatgtttttatagtatgtatgtaaatgtgtgtgtgtgtgtgtgtgtgtgaagagaaagagtgaatagagagattaagatttttttaatggtgaaaagatatatatatatttggaattagttagtttgatttagtttaggtgattttaattttggtggtaataattaaagtattgtagttaggagttagttgaatatatgtttttttttttttattagattgaattagagtgttgattttggttatattaatgttataaatttttttatagtttgtttgatttggtgtttgttggttttaatatttatagtgaatataagtaggttgttgttttttattttttttatagtttatttagtggttagtggaaatttgatgataatatggtggttaagttt

SEQ ID NO: 279 - DNA, 4316 bp, Artificial Sequence
  chemically treated genomic DNA (Homo sapiens)
aagtttgattattatgttattattaagtttttgttgattattgagtaggttgtgaagaagatagaaaataatagtttatttgtgtttattgtggatgttaaagttaataagtattagattaaataggttgtgaagaagtttgtgatattgatgtggttaaagttaatattttgatttagtttgatggagagaggaaggtatatgtttgattggtttttgattatgatgttttggttgttgttattaaaattgggattatttaaattgagttaagttggttaattttaaatatatgtatatttttttattattaaaagaattttaatttttttatttattttttttttttatatatatatatatatatatatatttatgtgtatgttataaaaatatatttatttgtatttataaaaagatatatttttattttttatttttaaaatttatgtatgtttgtgaggtataagtgtaattttgttatattgatattttgttttttagttttatataaggaagttgttttatattatagagaaaatatttatgaataaatttgtattagttatagtgagaggtaatattttaaatagtttattttatgtttaagatatttaagttaaagaaatttaatagtatagttgagttttttttgtttttttttaatattttatttatattagggtttttgttttggagtgttatttttattagttgtgagagatattttagagttttgggtattgttagtgattggggtagaataaaaataggatttggttagagtttatagatgtggttagaggaattgtggggtgggtgagtttttttataggtttttgattataatattttaataattttagggattagttttttttattttatttgtagtttgagagtagttttttttgtttttatttatgggaagaaaatgttttgtgagaggttagaaaggaggtagggttataaggttttagagtaaatttttagtttttgattttagagaagtttttagaaaagtgtaattgtagatttagggtaggattaagaaatatgaagaaagtagatgtgggttttggattaattgtttttttgaggtttgttattagtagggatttttttttgtgatttgtgattgttgggattaggttttattattattataattattgaagtgaagaatttgttttttatttttataggagttttataaatgagtaggtgttggtatatagggtttaggttgggtagatttatgagtgtggatggtgttttttagtaatgaggtagggtatatttttatttggggtttgtaatttttagtgggataagaaaatttagattttattttttatttttttttatttgagtttttttttttttatattatagtagtgattatagttttagtgattatagttttaaggataataaggttagtaatgatgtttatgatggggatggtgggttggggagattgttttgggaaaggaagggaaggtgaggggttttgatttttaggttttagttttgattttgttgaagagttttagaagggtttttgttttttttgagaaaagatatgattttttgtttttttttttatttatttttttttttattttattttaggatgaggggttggggtagttttttgtgttgtatatggtatgtgtatttttgtttttttttagaaggtattattatagtggtttatttttggaaggttttattttttgtaggtttggtttttataagttttgtgttttgggtttgtttttttttattttgttgttaggttagtgtgatttttgtagggtagaagtttagggtttagtattttagggtggttttatggttagagatggggtggtgggtaatgtgtgtttttggaggatttgagaagagttagaaaatttaggtattttgtattttttatgggaaattttagtagtatttatgtgattaatttgagaatggataggatatttggggtggggaagggagtatagaatttagatattagtttggatatagatatttgggaaaattttttattttttggaaagtttgagtttttgagtggggagtagggatttttggttttgatttaagtggaggttgagggattggaattagagttttaaatatattgagtgtgaggtagagaataaaatttgagagaaaagttatggggtttaaggttgttggagggtttaaaggggattgtggattggtattttagggattgttttttttttatttttttagagattttattttttaattgttttagagagtagggtggatttttatagttattttttggtattggattttgaaagttaggaagattttttttatttaggattagagggagggtgatattttagtattgggtttattttttttttaattttgtgtgaggttattttaagagatttataggagatagggaaggtgtttatggtttttggtatttgtgtgttgtagtgttttttttttattttttaagtatttgtggagtaattttaggtatttgttttttaggtaggttttgaatttttttgtatatttttttgttttatagaagtgttgggtgatttgagttatggtgtttgttgtggtttaggagtgtaggtttttgtttagggagatgtaatttttgttgttgtatgtgtgttggtgatatttgtggaggaggtgtttgttgggttttatgttgtagttatttattttttggagggtgtgagattttagttggtttttgtagttagttttgtttagttagttttgttttttttttgtttaatttgtggggattttggtttaaattgaaaatgaattttggtaaaggtgtttgggatttttttgggtggagggtttgggtgggtttgttgttttggggtagattttggatttggagatttggggggatttgggtggtttgtggtggatggggggtggttgtgatttgtgtttttggttgggtttatttattagttttgttttggttgtagtggtggagtaggttttttagggttatttggttagtttgtgtgttggttttggtgtattttgtggtttatttttaatattgtggttttttttgttttatttatggtttttgtggttttatttttggaattgtggtgttgttgttgaattgtaggaattgtgtgttgtttatgtattttatggtgatgtagtggggttttttgtggttgggttgtgatatagtggtgttgaaatattttaaggagtgggagtttgggggtgaggagggggtgagatttgttagatttttttttgggtgtggttttttgagttttgtgtttttattgggtgggttttttatttttttttatagaggttgtttttttttggattttgtatttatttgtttaagtattggttagggttagggtttttgagagtagtaggaggaggttttggggtgttatgattttaatttttgtgtttgggaaaaatatgagttttgtggggtgtgtgggattttagaatttgggaattgtggtgatattgattggtttttttagaaatgtgatgtttaatgggagtgagaaatggggttgtgttatgagtatttaggatgaaggatttgatatgggttgggagagaaagagaaattttggggagatggggaatttttaatattgagttttttaattttagatattgttttggggtttgagtttttgagagttatttttggggttttgggattttgtttttttttttttttttttttttttgtgtagggtgtgttttaatgtttttttgagtttttgtttgggggttgagaaattagggagaaatttttggtatggatttagtttatttttttttattatttattttgaaattttagttttttgattgaattttttgttttttattttatatttggattttttggatttttttggaagaaaatttattttaaggagtttggtgttagataatgaatttgttttgagaatgaaggtttagagatagttttttttttttttttttttttttttttttttttttttttttttttttttttttttttttttttttttttttttttttttttttttttttttttttttttttttttttttttttttttttttttttttttttttttttttttttttttttttttttttttttttttttttttttttttttttttgtttttttttgttttttttttttttttttttggaaaagttgtatttgagtatatgaaataggatagagattagtttttttttttttttttttttttttattagttgtag

SEQ ID NO: 280 - DNA, 14147 bp, Artificial Sequence
  chemically treated genomic DNA (Homo sapiens)
gggggtattgagtaatatatttagattaataatattttataagtgtgagtattattgatttaaatttttttgttggttgtgttttgtgtttatgtttgttttatatttattttttttagagttgttttttttagagttttagtaatttttatttttttaaatttttttagttatgggaaggattagtaggtgttagtggatttaaaagaattttagatttgttgagatttttgatttttggtgtttagattaattagtaaatagtttaattaaatggtttgtttttatggttaatataattttgaattggtggttatttagattaagtttattttgtttttgagatggaattttgtttttgttgtttaggttggagtgtagtggtgtgattttggtttattgtaatttttgttttttgggtttaagggatttttttgttttagttttttaagtagttgggattataggtatttattattatttttgattaatttttgtatttttagtagagatagggttttgttatgttggttaggttggttttaaattttgattttagatgatttgtttattttagtttttttaagtgttgggattgtaggtgtgagttattgtgtttagttaaagtttagtttgtataagaaggttttttttgttatgttataggatttttgagtttattaaatagattttaatgttttgagattttatgtatttttttaaaatgaagtatttaaattgttagtgtttgtttttttgtttggtttttttgatgtattgatttggtttgttagtgtgatgaaaaatatggttgagttttattgttttattgtaattagtaggattgtttagaagtttaatttttttaagagatgaagatttgagtttatgtagttggttgttttttaaaaatatttggttatttgggatatattttgaattaattttttggttattttatgtgattaaaagtgttagttttttttgtttttagtatatttttttgtttgggaagtggaagggatgaaatttttatatttttttttgatgatatagaaaggagtatatatttatattttatgaatagatatgtaattatagaagaaatagtttaatggttgggtgtggtggtttatatttgtaattttagtattttgggaggttgaggtgggtggattatgaggttaggagtttaagattagtttgtttaagatagtgaaattttgtttttattaaaaatataaaaaattagttgggaatggtggtaggtgtttgtaattttagttatttaggaggttgaggtaggagaattgtttgaatttggagggtggaggttgtagtgagttgagattatgttattgtattttagtttgggtgatatagtgagattttattttaaaaaaaaaaaaaaaagtataattatatgattatttatattgttttatatattaaattagtagtaatttgttttttatatagtaaataaaaataaattagtagtaataaatatattttttttgtgttatagttagtatttggtgaattttgtattttttttttttttaaagtgttgaatttataggtttttataaggtaagtttatattattaattaattttgtttttttttttgatgttaaaattgttttttaggagttgattaggtttatttttttgttttttaagtattatttttagaatatttttgaaagtatttttgttttttggtaataatatttatattttatttattttttgtttttaaatatatatttagttaattttaggttttttttaatggagtagttatttatttatttaatatatgttgggtgttttttttgtgttatatattgttttggtttttggggatagagtaggaaataaaaaaaaataaaatttgtttttatatagttgatattttagttaggggagataaataataaataaatgaatgatgtagtatgttagatgttgatagtgttatggagaaagtatattatggagattagaagtattatttgtaatggaatagttatgattttaagaagaatggttgattggatgtgaagtgtgagagagaggagtttaggtttttggttgagtaattggagggatggagttgttattatttgagatggagaagttaggggaggagtagatttggaggggaaggttaggaatttagtttggaatttgttaagtatgaggtatttattaaatattgaagtggatttttagaagatgttattaaaattagttaagtttaggagagagttttgggttagaaataaaaatgtgggagatattggtatatatatgggtttatattatttttttttttaatttaatattttattttattgttttttgtttttttaatagtatttagttttatttattttttaaattgatttttatattgatagtataataaaatttatattttttattatattaagattttgtgtgatttaatttttttttattttttggattttgttttaggttattttttttttttatttaatttttaatattttgattttattgttttttaaatagttttttgttgttttttgttttttttgtggaaaaggtttttttattgtttaattattaggtattttttgatttttttttattttttatttttgagaaaggttttttttgattttttatattaattaggatttttttgggtgagatttgatttaaattggtttagagaaaaggagttaattgattggtttatgtaatttaattttttttttttgttgtaatttttttttggtttttattttatttaaggttaaagttagggtttttattatggttttgtaggttttatatagtttgttttttttattatttttttgattttattttttatattttttttttatttatttttttttagttagagtggtttttttgttgtattttaaatatgttaggtatatttttattttagtgtttttgtgtttgttgttttttgtgtgtggaatatattttttatatagttatattatttaaaatttattgtttttaagtttttatttaaatgtttttttgtgaagttatttttgagttttttttaaaattgtagttttttatttttgtattttttattgttttttatttttaatttttgttattgtagttagaattatttgatatatagtttttattttattggttttttgttatgtttttttttataagaatttgaagtttattaggttgggagttttgtttgttgtgtttgttgttattttttagtgtttaaaattgtttggtatatagtaggtatttaataatttttgaattagtgaaaattagatggtggtttggtatttttatataggaatgagttaggtggaaattatttaggatataagtagattttgaagtgataaggaagggttattataattatgtggggtttattttgtttttttttgttttttttttttaggtttagtaatagttttattaaggattttatgaatattaaagtttatatttatatgttgttagaggtgagagtagtttattttattattagattttgtgtttagggtggtgatttgaagaaggaagagagtgaaagaagggaaggattatttttttttttaaattggagttaagggagggaggttagagtaagtttgggggtgtaatttagatttagtttttgtttaattttttttgtttttttttttaggggtttagagaattataaggtttgtagaattttttagagaagttttattattgattttttttttttatttttagatattaaagagtttgaatgtttttgagttatatggtttttttttttttttataaattttgttagttgttatgggggtttgtttttagggtataaagttattgagagatttagagatttagtttttttgtggaatttttaaaatgttttagtagttttgtttttagtttgttgtttggtagtatttgttagttgattttatgtattgtttttttttttgttattttggtaatttgggttttttattttatttttttttttatttttttttttagatgttattttttgaattgttatagagaatgggttaatttatggtggaggtttgtttatttttataataattaaagggttttaaggtttatgtttttatatatttaattattttttaggtattttaaattatatttaaattttaatttagttttattttgttttagtttttgtttgtaagtgttttagtttttaatgggtatagatttggattttgttttttttagttgggtttttattttaggttgagtttagttattgttaattaatgtagagttaggttttttttttttttaattttggttgtagtttaattttgttttttgaaagtattttgtttttgttatttaatgtttttttgtgtgtttgatagttattttgtttttttatttttgttgtgttttaaatttgtttttatttagttttatggttttgtttaattgtagagttgttttgtttgtttatgtggagtttagtttgatttatttttgttggttgttatgtttatttttatataagttttgtttttgttgagtagtatggtgtgtgatattgtttttttggtgttttggtaggggtttagaagttttttgtttgttaattagagaaaaatagggttatttatttttgtttttgggggttgttttttattaattttatgtaagttaattagtgtgaggtagatttttgtttttttgatataggttttgagtttttttagttgtttatagtttgttagtttttgagttaattggtgtggagtattgtgaaggttgaatgtgtttttttgggattttaggggttgtgagtgttttattatttttttttatgttaattatggtatagttttgtagggaagggtttgttttttaattttttgaggttttgtggttgattaatagtgttttggttaattagtgagtggtgggatattgggttttttttttttgggtttatgtgagttgtagggaaatgtaggggtggtttttaggtgttgttgttgttattgttattattatttttattgttgttttggaatttaggtttggggggtggtggggttgtgtatggagtttttgttttttggagttgttaatattgttaatgttattgttatgttatatataggtgagttttgggtttggagggtggagggtttagtttgtgattttatgtattttttttgtttttgtgtagaggatgtggtttggttggtggtttgttggtgtttgattttttgttgttattattatggttggtggatttgtgtgtggtattgtttaagttttttgttttttatagtggatttgattgtggtttaattttttttttttgttgtataatggattggtttgtgtgtttatgtttttttttatgttaatttagggtggatttgtttataggttttttttttatttttatttttatttgttttttatttatttttatttatagggagttagtttgtgatagtgtttagtttttttaatagtaggtgtatttgagtgtttggattttttttagttttaatttttaggagatttgtttgtggttttatttattttattttttttgtatattgtagtgaattaatttgtggtgttgtatttttttgtatttttttttaatagtgagtttatttgagtttgtatttttgttttttttagttttttaatgtattagtttatggttttttttaaaattattttttttttttattattattattattattttatagtggattagtttttatgtttggatttatgtttttttagttattagtttattgttttgtttttttttttttgtagattgttgttttagtgtttggggtttttttttttttaatagtgggttagtttagtgttttatatttttttatttttagtagtttagtttatagttttttttttttttgttttgaattagtttgtgtgatggtttttttttttttttattgtggtgtaggagtttgtaaggttttttgttttttttttttttagatgatgagttttattatttttttttttgtagtggatttgtttattggttttttttttttatatttttgtatgtttgtatagttttttgtatatttttttgtgagtttagtgttttgtaattgggggaagattggttgtgtatttttaatttttttttttttttttttttttttttagaagagaatgtgttgatttttttttttttgtgatggagtattgtatggttttttttgttttttattttttaatagtgggttagtttggttatatttgtaattataaagatgttttgttttattataataagtgaatatattagtgttagtgatgatagtaatgttaataggagttagtgtttattgagtatttgttgtatattaggtagagtgttttatatgaatgagtttttttaatttttattataattttatgagataggtagtgagggaattgggttatagggaggttaaattttttatttaaaggtggtttaggaagtatttaggatataggataatttttgaggttttttttttagattttattttattttatgtgaggttttagtttttaaaaattaaattagtttttatttttaagtttttgtttttgttgttttttttgtttgtagagtagtttttattttttatttttttttagtatttatttattttttaattttagtagttgtgtgattttagatgagtgatttaattattttttttttgtgtttttttttttatttgtgaaatgggggattagaattagaattttttttagtgtaaataaatattaattgtgaattaatggtaaaataagtaatttttttagtattattgtttatatttttttatttttttattgtgttttaattatattggttttattatatagttttttaaatatagtaggtatgggttagttttagggtttttgtattggttgttttttgtgttttgaatattatttttagatttttgtatggttttttttagtattttgtttaaatattaatttttaaaggatgtttattatattgtggtgtgtggaatgtagtataaaaagatatatgtatgaaagatgtttttaagaatgttagtttatatatgagtaagggttttttttttttttaaaaggatgtgtttataagattgaggtatgtaatatgttttgtaaaggtataggtataaaagttgtttttaagagtgttagttgtatatgtgaataaggattgtgttgttgtattgaaagaatgtgtttataaaattgtggtgtgtagttgggtataggggtgtgtatttatagttttagttatttgggaggttgaggtgggaggatagtttgagtttaggagttttaggttagtttgggtaatatagtgagatttttttttttgaaaaaaaaaaatttaaaaaataattattgtggtgtgtgtaatatatttttttaaaggtataggtgtaaaagatgtttttaagagtgatttgattttgttgtatttgggtagtgttattttattaaaggttgattgttatattatggtatttagaatatattatataaaggtatatgtataaaaaagaagtttttaataatgttatttgtaaaaataaaaaaagttaatttttttttgattatttgaagttgtatatttagtagggtttaagttaggtttttgatttgttttgttgttttttattattgtttgatatattgtgtgggttatttgtttgttgtttgtttttttttattagaatgtgagttttatgaggatttagtttttgtttgtttatttattgttatgtttttagtaattgaaaatgtattaggtaaatagtagatgtttaataagaatttattttatgaataaatgggaaaaagataatttgagatattagtgtaggggttatatgaggaagaagaagggatatgagagttaattagttgggattgtttttgtaattaatttttattgagttttttgtgagtattaggtatttttttaggtgttggaatatggtaaggaatgaaatagggtgaaatatttgtgtttgtggagttgatatttattaaaagttggggaggttgggtatggtggttaatattagtaattttagtattttgggaggttgaggtgggtggattgtttgagtttaggagtttaagattagtttgggtattatggtgaaattttatttttattaaaatataaaaaaattagttgggtgtggtggtgtgtgtttgtaattttagttatttgggaggttgaggtaggagaattgtttgaatttaggaggtggaggttgtagtgagttaagattgtattatgtattttagtatgggtgatagagtgagattttgttttaaaaaaaaaaaaaaaaaaatttaagttggggagatagattatgtgaataaaataaataagtaaaattagtataatagataaatgttgagaagaaataatgaaatagggtaggtaggaattgagtattgggggtggttgaaattttaggtatagggaaggtgatttttgaattagggttttatggtagagatggagagagttttaatgtttatgggaagagtatattaggtagaaggaagtgttagtttagaggttttgaggtgggatggtgtttgttatgtttaaggaatattaaggtggttagtgtggttggagtagagtgtggggaagggtagaaggtgaggttatataggtgatgggagttagatagtgtaggtgatatataggataggattgtaggggtagggggagaaggatgatatattagttaatagttaatatttgtggagtatttgttatatattagaggtatttttttgtttaaatattaatttttaaaggatgtttattatatggtggtgtttggaatgtattataaaaagatatatgtgttaaagatatttttaagaatgttagtttatatatgaataaggattttttttttttttaaaaggatatgtttataaaattgaggtatgtaatatgttttatggaggtataggtataaaagttgtttttaagagtgttagttgtatatgtgaataaggattgtgttgttgtattgaaagaatgtgtttataaaattgtggtgtatagttgggtatagaggttgaggtgggaggattatttgagtttaggagttttaggttagtttgtgtaatatagtgagatttttgtttttgaaaaaaaatttaaaaaataattattgtggtgtgtataatatatttttttaaaggtataggtataaaagatgtttttaagagtgatttgattttttggtatttgggtagtgttattttagtaaatatttattgttaaatattatggtgtttggaatatattatataaaggtatatgtataaaaaagaagtttttaataatgttatttgtaaaaataaaaaaaaaagttaattttttaagttttttatagaagtattttatagaattgatatagttaatttttatagaagttttggagggtaggtgtatttttgagaatatttgattttgagagtaaaatatttttattttatagatgaggaaataagtaaagagaggttgagtaatttgtttagggtaattttgagttagaatagttagaataggggtagaggaatataaggttgaagatttagaaagaagaatagatttgtaagggtaggtaggttatttggtatttttgattatgtagaggaagaatgaattttttttggaatgtgatgattgtgtaattgagtttatgaagtgagggaagagttttttttgtggggagagtagtttgtgtttatttttagaggttggaattgttttgggaatggtagatagtttagggtggttgttttagagtttttgtatatgttgtttgttttgtttgaaggtttttttttatagagggtagtttggtttgttatttttttttttttaggttaggtgttatttttttggggaagaattttttgtatattttgtgtaaaaatagtatttttgttattttttaggattttatttttttttgtttttttttatggagaattggtggtgtaaggtgattgtttattagagttaaattatttaggttttgaattttggttttgttaatttttagttgtgtgatttggggtaggttatttttttgtatttttattgttttatgtggaaaatgggggaaatgataatttttattttttaatggtggtttgaggatttaatgagttaaatgatttaaagagtgtgtagtttatggtaaggattgtatgtttggtttgtatttttaaattattaaaatgtatttatagtatatttgtagatgtttgataggtttttgaaattgattatttttaaaattggtgtgattttttttaaaatttatttttttgtaaggtttttattttagttgattataatgttgtttttgtgggtgattaggttataaatttagatttattttggattttttttttattttttttgggtatgttatttgttagtaagttttattttgtgtttaggttttttttagattttagttattttttgttagttttattgttattattattatttattgtagtggtttttttagttttaatagtttgttttttttataattgttagggggattttgttgaaattttagttatagtttgttatttttttgtttataatttttttgtggtttttgttttatttaatattttgatagtatttgaaaaagtttggtttagtttggtttttgttattttgttttttttttttgttgtttttttttttttttttgaatttatgttagttttttttttttatgttatttgttaggtattttttagttttgggttttttatattggttgttgtttttatttggtttgttgtttttagatatttatgagtttagtttttttatttttttttggtttttgtttagttgttttttttttggtgattatttttttttgattttttatgtaaaagtaatagtttttttttgtttgattttttttttataatttttattattatttgatgtatttttgtatatgtttgtttttttttttatttgttttttttgttaagatgtgagtttttttggagtagggattgttgtttgttgtgtttttgattgtatttgtagtatttggtttatagtatgtatttattaaatgtttgttaagtgaaggagatggaaagaagtaaatatatttaagtaaggtagattattagaatttttatgaggggttaagtgggagaaataataaaatataaagttttgtgtgttgttgaagttggaagtttattgttattttttatttagttgataggttttgttgtagttgaaagaagaattggtaaaattgtttgtttttgttattaggagttattttgaattttttggatttttgaaataagtttgtttgtaaaataaatttagtgaggtttttggtgataggattttttaattggatattttatggttttgtgatttgtataattgaataggaagtttatgtttatttttagtttgtttttaggaaagaaagtagtaatggggtgatagggaggattttgttttttgaaggatatgttgagagggaatagttggtgtgaggggttgtttagtttaatggtgaaatgtttagttaattggaatttgattgtttggttttaaatgttggttttgttatatgtggtttgtggaaggtatgtagatatttgtgtttttgttgttttatttataagttaatgataggaagattatttattttttagaggtatgattagggataaataagttaatgtttattaaaaaaaaaaataatagtataggtgtatatgtttttatttaaaatttttggggttagatgtgttttagaatttttatttttttatattttagaaaggtaatatgatgtatatatgatgttatataatattttttagtaagttttgtaattggttgtgtttatatttttgtagtaaaatgtatgaatatttgtaataagtgagatttaataaagattagaaagggttttgttttattttaaattaggttttgttattaaaagagttaaaagaagttttttgtttttagagtattttggatgttggaatggtagataagggattatgaataaattagaaattaatatttagagtttattatatattttaggtatataatatttaatttgtataatatttttgtgaattaggtattgttatttttattttattaatgggtatattattatttttgttttatatatgagaaaattgaggtataaagaggttaaagaatattagttaagtgtggtgttttatgtttgtaattttagtattttaggaggttagggagagaggattgtttgagtttaggagtttaagaatagtttgggtaatatagtgagattttattttttaaaaaaagaaaaagaatatgtttagggttatatagttaataagtggtagaattaggatttaaatattggtaatttggttttagtgtttgggtagttgtttagtaggttatattgtttttttgtttagaagagtgtttgatgtgtattaagtttttaatagatgttaattattgttgttattaagaaagagaatatttagggttgagtatggtattttatatttgtaattttagtattttgggaagttaaggtgggaggtgggtggattatttgaggttaggagtttaagattagtttggttaatatggtgaaattatgtttttattaaaaatataaaaattagttgggtgtggttgtgggtatttgtaattttagttatgtgggaggttgaggtatgagaattgtttgaatttgggaggtagaggttgtagtgagttaagattgtgttattatattgtgttttagtttgggtaatagagagagattttattttaaaaaaaaagaaaaaaaaaaaaagaatgagaatatttagggatagtaataggatagagagattaggtatttatttagttttaggatggttttataaaggaaaggatttttgggttgggatttgaaagataagaaagattgttaggtgaaagaaggaagttttatgtggagtgagtagtttttgtaagggtttggtaaaaaaaaaattttttgaaaaatttgatattgatatggtagaagatatagataatatttaaatgaggaggatggaattagttttttatttttgttgtaataaataattataaatttagttgtttaaaataatatatttgttattttatagttttgtaggttagaagttttatattggttttagttgaaattaaggtattggtagggttgtgttttttttggaggttttaggggaaaatttattttttgtttatttaagttgttggtagaatttaattttttgagattgtaggattgaagtttttgtttttttattgtttgttagttgatagttatttttagttttaagaggttgtttatagtttttgattttgagttttttttttttatttttaaagttaataatggtaggttgagttttttttatattttgaattttttttgttttttttgttattatatttttgagttatttttttttttttattatttgttttttagagtttatatgattagattgaattttattaaataatttagaaataatttttttgttttagggtttgtaattttaattttatttgtaaagtttttttttgttatgtagtgtaaataatatataggttttgaggattaggatgtggagtagggttggtattatttggtttattatagtttgttttttgatttttatagatttatatttgttttatatttaaaatatatttatattattttaagatatttatgagttgtattttattatagggagtattttaagtaagattggggagttagaagttagtttgggaaggtttagggaatgatggtagggtttgaagatagagatggagaaaagatgataaaaaaaggaattttttttttgttgatttttgttttttttatgtttatagttttttaatttagttgtttgttttttagg

SEQ ID NO: 281 - DNA, 14147 bp, Artificial Sequence
  chemically treated genomic DNA (Homo sapiens)
tttggagagtaaatagttgagttgagaggttgtggatataggaggggtagaggttagtgggaggaggatttttttttttgttattttttttttatttttgtttttaaattttattattattttttaaatttttttagattaatttttagttttttagttttgtttgggatgttttttgtgatgggatataatttatgggtattttaggatggtgtgaatgtattttgaatgtgaaataaatgtgaatttgtgggggttagagggtagattgtggtaggttaaatgatgttaattttgttttgtattttaatttttggaatttgtatgttatttatattatatagtagaaaggaattttgtagatgaaattaaggttataaattttaagatagggagattatttttggattatttgatgaaatttaatttaattatatgagttttgaaaagtagatgatggagaaagaaaggtagtttagagatgtgatgatagaagaggtaggggagatttaaaatgtgagagggatttaatttgttattgttggttttgaagatggaggaaggaggtttagaattaaggattgtgggtagttttttaaagttgggaatggttgttagttgatagatagtaaggaaatagggattttagttttataattttaaggaattggattttgttaataatttgaatgagtaggaaatggatttttttttagagtttttagaaggaatgtaattttgttaatattttgattttagttgagattagtgtgggatttttgatttatagaattgtaagataataaatgtgttgttttaagtagttaaatttgtgattatttgttatagtaagaatagaaaattagttttattttttttatttgaatattatttgtattttttattatattaatgttaagttttttaggaggttttttttttgttagatttttgtaaaggttgtttattttatgtggggttttttttttttgtttagtagttttttttattttttaagttttagtttaaaggtttttttttttatgaagttgttttaaaattgaatgaatgtttgatttttttgttttgttattgtttttgaatgtttttgttttttttttttttttttttttttttgagatggagtttttttttgttgtttaggttggagtgtagtatagtggtataattttgatttattgtaatttttgttttttaggtttaagtgatttttatgttttagttttttgtatagttgggattataggtatttatgattatgtttggttaatttttgtatttttagtagagatatggttttattatgttggttagattggttttgaatttttgattttaagtgatttatttattttttattttggttttttaaagtgttaggattataggtgtgagatattgtgtttggttttgaatatttttttttttgatgatagtaataattaatatttattgagagtttaatatatattaggtatttttttaagtagagaggtaatatggtttgttggataattgtttaggtattagggttagattgttagtgtttgaattttggttttgttatttattagttgtgtgattttgggtatattttttttttttttttaagaaatggggttttattatgttgtttaggttgtttttgaatttttgggtttaagtaattttttttttttggttttttaaagtgttaggattataggtatgaggtattatgtttggttgatattttttaatttttttgtattttaatttttttatgtgtaaaatagggataatgatatgtttattagtaaaatggggataataatatttagtttatagagatattgtatagattaaatattatatgtttgaggtgtatgataagttttaaatattagtttttgatttgtttatagttttttatttgttattttaatatttaaaatgttttaagggtagaaagttttttttaatttttttggtggtaaaatttgatttgaaatgaaataaggttttttttggtttttattgaattttatttattgtgagtgtttatatattttgttgtagaaatatgaatatagttgattatagagtttattaaggggtgttatgtaatattgtatatgtattatgttatttttttgaaatgtgaagaaatggaaattttgaaatatatttggttttaggggttttgggtaagggtatgtatatttgtattgttatttttttttttaatgggtattgatttatttatttttgattatgtttttgagaagtaggtagtttttttgttattaatttataaatgaggtagtggaggtataaatgtttatgtattttttataggttatatgtggtaaagttagtatttggagttaggtagttaggttttagttgattaagtattttattattaggttaaatggttttttatattgattatttttttttagtatgttttttaaagaataggattttttttgttattttattattgtttttttttttgagagtaaattggaaataaatatgagttttttgtttaattatataagttataaagttatgaagtgtttgattagagagttttgttattagagattttattgaatttgttttgtaggtaggtttgttttagaagtttaaagagtttagagtgatttttggtggtaaagataggtaattttattagttttttttttagttgtaatagaatttattagttgagtgaaaggtgatggtgggtttttagttttaatagtatatagggttttgtattttgttattttttttatttgattttttataagagttttagtaatttgttttgtttagatatgtttatttttttttattttttttatttagtaagtatttggtgagtgtatattgtgggttaggtgttgtggatatagttgagaatgtaatagataataatttttgttttagaggagtttatattttagtaggaaaggtagatgagaaaaaaggtaaatatgtataagagtgtgttagatggtggtaagggttatgggaaaaaaattaagtaggggagagttgttatttttatatggagagttaggggagagtagttgttaaggaggggataattgggtagagattaaaaggaggtgaaggaattgagtttgtgagtatttgagagtagtaagttaggtggaagtggtagttggtgtgaagggtttaaggttggagagtgtttggtaggtgatatggggagaggaggttgatatgggtttgggggagaggagggaggtagtgggagaggagaatagagtgatgggggttagattgagttaggtttttttgggtgttgttaggatgttgagtgagataggagttataagagggttgtgaatagagggatgataggttgtgattgagattttaataggatttttttggtggttgtgagaagaatagattgttggggttgaagaagttattgtggtagatgatggtggtagtagtggggttggtgagaagtagttggggtttggagaaagtttgaatatagaataggatttgttgatagatagtatgtttgggggaggtgagagaagggtttagggtgagtttaggtttgtggtttaattatttataaagatagtattgtggttagttgaggtgggagttttgtaggagagtaagttttgaggggggttatattagttttggagatggttagttttagaggtttgttagatatttatgggtatgttatgaatatattttaataatttaaaaatgtaagttaggtatatgatttttattgtgggttgtatattttttgaattatttaatttattgaatttttaaattattgttaaagggtggggattattattttttttattttttatatgaggtaatggaggtatagagaagtaatttgttttaagttatatagttggaagttggtagagttggaatttaaaatttaagtggtttggttttagtgagtaattgttttatattattagttttttatgaagagaaatagagaagggtaagattttagagagtgataggaatgttgtttttatatagggtgtataaggagtttttttttaaggaagtgatatttggtttgaaggaggggaggtagtaagttaggttgttttttgtgggggagggtttttaggtggagtgaatggtgtgtataaaggttttgaggtagttattttgaattatttattgtttttgagatagttttaatttttgagggtaagtatgggttgttttttttgtagggagagttttttttttattttatggatttaattatataattattgtattttaggaagaatttattttttttttgtgtgattaaaggtgttaaataatttgtttgtttttgtaaatttgtttttttttttgagtttttagttttatgtttttttgtttttgttttggttattttggtttaaggttattttgagtaagttatttagtttttttttgtttgtttttttatttgtaaaatggggatattttatttttaaagttaaatatttttaaaagtatatttattttttaaggtttttgtgaggattaattgtgttaattttgtaaaatatttttgtaaaagatttgaggggttgatttttttttttgtttttataagtagtattgttaggaattttttttttatatatgtgtttttgtatagtatattttaagtattatagtgtttaataatgaatatttattgaaataatattatttaggtgttagaaaattaaattatttttagaaatattttttatgtttgtgtttttaggagagtgtattatgtatattatagtggttattttttgggtttttttttggagatggggattttattatgttgtataggttggtttggaatttttgggtttaagtgatttttttattttagtttttgtgtttagttatatattatagttttgtgaatatatttttttaatgtaataatatagtttttatttatatatataattagtatttttagaaatagtttttatatttgtgtttttatagagtatattatatattttagttttgtgaatatatttttttgaaaaggaggaaaatttttatttatatataaattggtatttttagaaatatttttgatatatgtatttttttgtagtgtattttaggtattattgtgtggtaaatattttttgggggttggtatttgaatagaaaagtgtttttgatgtgtggtagatattttatagatattagttattagttagtgtgttatttttttttttttgtttttgtaattttattttatgtattatttgtattatttggtttttattatttgtgtgattttattttttatttttttttgtattttgttttagttatattggttgttttgatgttttttgaatatggtaggtattattttattttagggtttttgaattggtatttttttttgtttggtatgttttttttgtagatattaaggttttttttgtttttattgtgaggttttaatttaagagttattttttttatgtttaagattttaattatttttaatatttgatttttatttgttttattttattatttttttttagtatttgtttattatgttaattttatttatttattttgtttatatagtttgtttttttagtttgggtttttttttttttttttttgagatagagttttgttttgttatttatgttggagtgtatggtgtaattttggtttattgtaatttttgttttttgggtttaagtaatttttttgttttagttttttaagtaattgggattataggtgtatgttgttatatttagttaatttttttgtattttagtagagatggggttttattgtgatgtttaggttggttttgaatttttgagtttaggtaatttatttattttagttttttaaagtgttaggattattggtgttagttattgtgtttagtttttttaatttttaataaatgttagttttataagtataaatattttgttttgttttgttttttgttatattttagtatttagaagagtgtttggtatttataaggggtttagtaaaggttggttgtaggaatagttttaattaattagtttttatattttttttttttttttatgtgatttttatattggtgttttaaattattttttttttatttatttatgggataaatttttattgagtatttgttgtttatttggtatatttttagttgttggagatatagtggtgaatgagtagataaaaattgagtttttatgggatttatattttaatgaggagagatagataataaataagtaatttatatagtgtgttagatagtgataaagggtaatgggataaattagggatttggtttgagttttgttgggtgtgtagttttagatggttagggaggggttgattttttttgtttttataagtagtattgttaggaattttttttttatatatgtgtttttgtatagtatattttaagtattatggtgtgataattaatttttaatgaaataatattatttaggtataataaaattaaattatttttagaaatattttttatgtttgtgtttttaagagagtgtattatatatattatagtggttgttttttgggttttttttttttagaaaaagggattttgttatattgtttaggttggtttggaatttttgggtttaagttatttttttattttagttttttgagtagttgggattataagtgtatatttttgtgtttagttatatattatagttttgtgaatatatttttttaatgtaataatatagtttttatttatatatataattagtatttttagaaatagtttttatatttatgtttttatagagtatattatgtattttagttttgtgaatatatttttttgaaaaggaggaaaatttttatttatatataaattggtatttttagaaatattttttatatatgtatttttttatattgtattttatatattatagtgtggtaaatattttttgggggttggtatttgaatagagtgttgaaaggaattatgtagagatttgggggtggtgtttaaggtataaagaatagttaatgtaaaggttttgaggttggtttatgtttgttatgtttgaggagttgtgtggtggaattagtgtggttggagtatagtaagggggtgggaaggtataggtggtaatgttagaaaggttatttgttttattattaatttatagttaatatttatttatattggaagggattttagttttgattttttattttataaatgaagaaaaaggtatagagaggaagtggttaaattatttatttaaggttatatagttgttgggattggggggtgggtgggtgttgagagaaggtgaggaatgaagattgttttgtaggtagagggaatagtaagaataaaagtttggaggtgagaattaatttggtttttaaggattgaggttttatgtggggtgggatgagatttaagaggggagttttaaaaattattttgtgttttgagtattttttgggttatttttgagtaaggaatttaatttttttatggtttaatttttttattatttattttatggggttgtggtgaggattaaaggaatttatttatatgaaatattttgtttgatatatggtaggtgtttaataaatgttagtttttattggtattattattattattggtgttaatgtatttatttattgtagtgaggtagaatgtttttgtggttatgagtgtgattaggttgatttattattaagaggtggaggatagggaaggttgtatagtgttttattataaggaaaagaggattagtatgtttttttttgggaagggaaaaaaaaagagaaggaaattgaaagtatatggttgatttttttttaattataaagtattggatttatgggagggtatgtgggggattgtgtaagtatataggggtgtgggggaggaaggttaatgaatagatttattgtaaagggaggggtgatgaggtttattgtttgaggggaaggggagtagaaaattttatagatttttgtattatagtgagaggagagaaaagttattatatagattgatttaaagtagagagggaaaaggttatggattgagttattgaaaatagggagatgtaaagtattaaattaatttattattaaaaaggagagaattttaagtgttagagtgatagtttatgaaaaagaggagatagggtaatggattgatagttaaagggatgtgaatttaaatatgaagattgatttattataaaatggtggtggtggtggtggggggggggggtggttttgaaaaaagttatggattgatgtattgggggattggaggaggtaggaatataaatttaggtagatttattgttaaagagggatgtggaggagtgtggtgttatggattgatttgttatgatgtataggaagggtggaataaataaggttatggatgggttttttgaaagttgaggttaggagaaatttaaatatttagatatatttattattaagggggttgaatattgttataggttagttttttataagtgggggtgggtggggggtgggtgggggtaggggtagggggaaagtttatggatgagtttattttaagttggtgtggggaaaaatataagtatgtagattgatttattatataatgggagggggaggttaggttatggttagatttattataagggatgaagggtttgagtaatgttatatgtaggtttattagttgtggtggtggtggtggggagttgaatattagtaggttattggttaagttatattttttgtgtgggggtgggaaggatatgtggggttatggattgggttttttattttttaggtttagagtttatttgtgtgtagtgtggtggtggtgttggtaatgttggtagttttggggggtgggggttttatatgtggttttattgttttttaggtttgggttttgaggtggtggtggaggtggtggtggtggtggtggtggtagtatttagaagttgtttttgtgtttttttatagtttatgtgggtttgaggaggaggagtttaatgttttgttgtttgttgattggttaaagtgttattaattggttgtaaggttttgaggggttgggggatgggtttttttttatagagttgtgttgtgattggtgtaaggggaaatgatggaatgtttatggtttttggagttttgaggaggtgtgtttggtttttatggtgttttatgttgattggtttaaggattgatggattgtgagtaattgaaaaggtttggggtttgtgttgggggggtgggggtttgttttatattgattggtttatatgggattgatggaagatagtttttaaggatgggggtgggtggttttgtttttttttgattggtggatgagggatttttagatttttgttaaaatattaagggggtggtgttgtatgttatgttgtttagtggaagtagggtttgtatagaaatgggtgtagtagttggtgggagtgggttggattgggttttgtgtaggtgggtagggtagttttatggttagataagattatagagttgggtaaagatgaatttagaatatagtggaggtaggagggtaggatggttgttaggtatatgaaagagtattgagtggtagaaatgaaatgtttttagagggtagggttgaattgtggttagagttaaaaaggggaggaatttggttttgtattgattggtggtggttggatttaatttagaataggggtttgattagggagagtgggatttaggtttgtgtttattggaagttggaatatttataagtaggggttaagataaggtagggttgagttagggtttgggtgtaatttggggtatttggggaatgattgggtgtgtgaaagtgtaaattttagggttttttgattgttgtgggaatgaataaatttttattatgaattggtttattttttatggtaatttaaagggtggtgtttaggaaaaggaatggaagaaagggtgaggtggggggtttaggttgttaagatgatagaagagagggtagtgtataaggttaattggtaaatattgttaggtaataggttggaggtaggattgttggggtattttggaggttttatagagagattggatttttgggttttttagtaattttgtgttttaggaataggtttttgtggtaattagtagggtttatggggaaaaagaagggttatgtgatttaaaggtatttaggttttttaatgtttgaggatggggggaagaagttaatggtgaggtttttttgggaaattttgtaggttttgtagttttttaagtttttgaaaaagaggatagaagagattgaataaagattgggtttgggttatgtttttaggtttgttttgattttttttttttgattttagtttagagggaaagatggtttttttttttttttgtttttttttttttttaggttattattttaaatatagagtttggtagtggggtgagttgtttttatttttagtaatatgtggatatgggttttgatatttatggagtttttggtgaggttgttgttgagtttagagaaaagaaataagaaagggtaaaatgggttttatatgattatgatgatttttttttattattttaagatttatttatattttggatgatttttatttggtttatttttatgtggaaatgttaagttattatttggtttttattgatttaaagattattaaatgtttattgtatgttaggtaattttaggtattgggagatagtagtaaatataataaataaaatttttggtttgatggattttaaatttttgtaaagaaagatataataaaaaattaatggaataaaagttatgtgttagatggttttaattataataataaaaattaaaaatgagagataataaggagtataggagtggggggttgtaattttaaagagggtttagggatggttttatggagaagtatttgagtaaagatttaaagatagtgaattttgagtagtgtggttatatggaggatgtgttttatatataaggggtagtaaatataaaggtattgaggtgggagtgtgtttggtatgtttgaggtgtagtaaagaggttattttggttggagaagaataagtgaagggggaatgtaagaggtgaggttagagaggtaatgagggagataaattgtgtgaagtttataaggttatggtaaggattttggttttgattttaagtgagatgggagttaagggaaggttgtagtagaggaaggaggttgaattatatgaattagttagttgattttttttttttaagttagtttggattagattttgtttaaaagaattttaattgatataaagggttaaggaaggttttttttaagaatgaagaatgagaaggaattgaagaatgtttaatggttaagtagtaggaaggttttttttataaaaaggataagaggtaataaagagttgtttgagaagtagtgaggttagagtgttagaaattgagtggggagggaaagtggtttaagataaggtttaagagataggaagaggttagattatatagggttttaatataataaggaatgtggattttattgtgttgttaatgtaggagttagtttgaggggtaaatgaaattaaatattgttggaaaagtagagagtaataagataggatgttaaattggaaaaaaaagtagtatgaatttatgtatatattaatattttttatatttttatttttagtttagaatttttttttgaatttgattagttttaatgatattttttaaaaatttattttagtgtttaataagtgttttatatttaataggttttagattaaatttttgatttttttttttaaatttattttttttttaatttttttattttagataatggtaattttatttttttagttgtttagttaaaaatttgggttttttttttttatattttatatttagttagttattttttttaaaattatgattgttttattgtaggtaatgtttttgatttttatgatatgttttttttatagtattgttaatatttgatatattatattatttatttgtttattgtttgttttttttgattagaatgttagttgtatgagggtagattttgtttttttttgttttttgttttatttttagggattagaatagtgtgtggtatagaggaggtatttaatgtatgttgaatgaataagtgattattttattaaaaggaatttgaggttggttgagtgtatgtttagggataggaaataaatgaagtatgggtgttgttgttagagagtaagaatatttttaagaatattttgggggtaatgtttaaagaatagaagaatgaatttgattagtttttaagggataattttaatattaaaaaagagaataaaattagttaatggtgtaagtttattttatgaaaatttatgagtttaatattttaaaagggagaaaaatatagagtttattaaatgttagttgtaatataaaagggatatgtttattattgttgatttatttttatttgttatgtgagaagtaaattattattgatttagtatgtaaggtagtgtgaatagttatatggttatgtttttttttttttttttgagatggagttttattgtgttgtttaggttggagtgtagtggtgtgattttggtttattgtaatttttattttttgagtttaagtgatttttttgttttagttttttaagtagttgggattataggtgtttgttattgtttttggttaattttttgtatttttagtagagatggggttttattattttggataggttggttttgaatttttgattttgtgatttatttattttggttttttaaagtgttgggattataggtgtgagttattgtgtttggttgttaggttgttttttttataattatatgtttatttatgagatgtggatgtgtatttttttttgtgttattaggaaagaatatagagattttattttttttattttttaaataaagaaatatattaagaataggaagaattgatatttttgattatataaaatgattagaaagttagtttaaagtatattttaagtaattaaatatttttaaaggatagttagttatatagatttaaatttttattttttagaaaaattaaatttttagatagttttattaattataataaagtagtaagatttaattatattttttattatattaatagattaggttagtatattaaaaagattaggtaagggggtaggtattgataatttaaatattttattttggggaagtatgtggagttttaaaatattaaaatttatttgataggtttaggaattttgtgatataataaggaaagtttttttatataaattagattttagttgggtgtggtagtttatatttgtaattttagtatttagggaggttgaggtgggtagattatttgaggttggagtttgagattagtttggttaatatggtaaaattttgtttttattaaaaatataaaaattagttgggagtggtggtgggtgtttgtagttttagttatttgggaggttgaggtaggagaattttttaagtttaggaggtagaggttgtagtgagttaagattgtattattgtattttagtttgggtgataagagtaaaattttgttttaaaaataaagtggatttggtttaaatgattattagtttagaattgtgttgattatgaaagtaggttgtttaattaaattatttgttaattggtttgaatattaagaattagaaattttagtaggtttgaggtttttttgggtttattagtatttgttagttttttttatggttggaaaggtttgaaaagataaaaattattgaaattttaagggaggtaattttggaaaaaatgaatgtagaatagatataaatataaaatataattaataaagaagtttaaattaatggtatttatatttgtgagatgttgttaatttaagtgtattgtttagtgttttt

SEQ ID NO: 282 - DNA, 3120 bp, Artificial Sequence
  chemically treated genomic DNA (Homo sapiens)
aattttaagtttaggttgggtatagtggtttatgtatgtaattttagtatttggagggattgaggtgggtggattataaggttaggagattgagattattttggttagtatggtgaaattttgtttttattaaaaatataaaatttagttgggtatgatggtatgtgtttgtagttttagttatttgggaggttgaggtaggagaattgtttgaatttgggaggtggaggttgtagtgagtggagattgtattattgtatttgtttggtgatagagtaagattttattttaaaaaataaataaagaaaatttgaagtatagtatttttttaaattttaaatagataatagaaattggtttttttttatttaaattagaatttaagtttaattttatatatttttgatagtttggattttgttttttaattttataaaattgggaatttaagtattatttggtttgatttaaatgtaatgtagaatttgtattaaaatattatattaaagttttagatttgtagtagttaatagtatttttatgtatgtgttagggattgttttaaatattttatatatattaatttttttattttgtatttttgtttttgttttatatagtaggaaattgaaatattgagaggttaagtaattaaagttatagagttagagtgataggagtaaagttttaatttaggtaatttagatttttagagttttgatttttattattaagttgttagtatagtttttttggtaattatttttaatttaaatataatttgagtgatttatttaataagttattattttgataatttagtgatttgtaatgtaaaattatttattgtaatttatttaatattattgtttttttgtgttgtaaaaattatagtaattgagatgtaatttattatttttttttttatttttggtattttgtgttaatttttttgttttgtggattttttttgattttttattatgtgtgttaattgttattaatttttttgtttgttggggattggggttgtgagggtatatttttgaggggtatggggttagggttaggtaggttgtgtggttgggtggggttttgtgttttattgtggagtgtgggttgggaagtggagagagaagtagttgtgtaatttgttggatgtggattagggtgttttttatttttgttgggagtttgttgattggttgggtgtgggtgtatgtgattgatatgtggttgtattggtgtagtttgttagggtgttattggagatagaatggaggtgttgttggatttggaaatggggtaggtgttggagttattatggttaggtttgttgtggggggaggggggaaggtggtttttttttgtattgttttaaattgatggtttttttttggtatagggtttattgtagtatgttaaatgaggaggtaggggtgttgtttttttgttttttattgtagtattggagatggattttttgtattttggatttagggtttttgatagaagaggaagaagggggaggggtagaagtgttaaggggagtttgttgagaaaagttgtttttgaagttagaaggggtttttgtttttataatgttatttgatagagtggaataatagtatttaaggaaatgggtagaggataataaagaatggagtatatttatggtgaggagtaaaagttttattttattgaaaggtttttttttttttttggtgataaggatatatgtattggtggttaaaagagagaggagataaaattgttgtagatggttgatgtgaatttagtggaaagagttattggggatgagagaaagaggaggaggtaggtattgtagagtgtgagtggtggtgttggttggtgaaatattggttattagtagtgtgtttgtttttgtaaaatatttaagtaaattttttgtgaatagggtggtaaatagatattagtgtttttgttagttataaaatgtagtggtagtggttttttgtggatgattgtagtagtgttttttttttttttgttaggttgaaaagataattgtagaggaataagaaattttgtagtaaatgttggggtagaagtttatttataagaagttatagtttataaatgtagtttgaatagtagaaaaaaaattattgttttttaaagtaggaataatgttaggttatgaatgttttgttattggaatgtattggatattttgattttatattatgaaagtgatgtttaaattttttgatttaatataaattttatatgaaattttaataaattatgtatgaaatagtggatttttttttttgttagtgaagtttttatgttattaattaggttatttaagagtaaattattttataatgtaaattattttgttaaaaattatggtgaataaatttttgtaggtttaatatttaagatttatagttaagtaattttatatttttttttggttgtttttagataatattgaataaatatttaagatattaatttagtgtgtaaatattttaaattaaagtaatatggttttttttttagatgtatttttgtttagtgagtatttatgagatatatttttgatataaagtgttttttattgagttttttttttttttatttaaatgtaaaagtttatttttatgtatatttatagtagttagtttgttatatttttttattttttgaataaggatggtagtggttttgtaaagttttttagggttagtgatagtgttttttaaataatgtttatgtaatagaaagttttaagatgatttattatattgttttagtaatatttttaagataatgtggaattgggttggtttagataaataagattatataagttttttattgataaatttaaatagttttttaaaaaattatttttgttttaagaattatttgattatggatattagggttaatagtatttaggagttgggtgtggtggtttatgtttgtaatataagttaaataggaggttgagggaagttgaggtaggaggattatttgagttttggtgtttaagattagtttgggtaattaagtaagattttattttaaaaaaaagtatttagagttttttttttaaaatttgat

SEQ ID NO: 283 - DNA, 3120 bp, Artificial Sequence
  chemically treated genomic DNA (Homo sapiens)
attagattttaaaaaagagattttaagtatttttttttgagatagggttttgtttggttgtttaggttggttttgaatgttaaggtttaagtgatttttttgttttagttttttttagttttttgtttagtttgtattataggtatgggttattatgtttggtttttaagtattattaattttgatatttatgattaagtaatttttaaagtagaaataattttttaaagaattatttaaatttattagtgaaaaatttatgtagttttatttatttaagttagtttaattttgtattattttgaaaatattattgaaataatataataggttattttaagattttttattatataaatattatttaagagatattgttattgattttggagggttttataaagttattgttatttttgtttagggagtggggaggtgtggtaggttggttattataagtatgtataaagataggtttttatatttaggtaaaggaaaaaaaagtttaatgaaaaatattttatattaagagtatattttatgagtatttattaaatagaaatatatttagaagaaaagttatgttgttttaatttaaaatatttgtatattgaattaatattttaaatatttatttagtgttatttaaaagtaattaaagagaaatataaaattatttaattataggttttaaatattaggtttataaaaatttgtttattataatttttgataaagtaatttatgttgtaaagtggtttgtttttgaatgatttaattaatggtataaaagttttattaataaaagaaaagatttattgttttatatataatttattaagattttgtataggatttatgttaaattaaagaatttgagtattatttttgtgatgtagaattaaagtgtttaatatattttaatgataaaatatttatagtttgatattatttttattttaaaaaatagtaattttttttttgttgtttaggttgtatttataaattatggttttttgtaaatgggtttttattttagtatttgttgtaaggttttttatttttttgtagttgtttttttggtttaatagagggagaaaaagtattgttgtagttgtttgtaaaaagttattattattgtattttgtaattaataaagatattggtatttgtttgttattttgtttatagggagtttatttagatgttttataaaagtaggtatattattggtgattagtattttattaattaatattattatttatgttttgtagtatttgttttttttttttttttttatttttagtagttttttttattagatttatattagttatttgtagtggttttgtttttttttttttttggttattaatgtatgtgtttttgttgttagggaggaaaagaagttttttaatggggtagagtttttgttttttgttatgaatatgttttattttttgttgttttttatttgtttttttagatattgttattttattttgttaaatggtattataaaaataaaaattttttttggttttaaaaatagttttttttagtagattttttttaatatttttatttttttttttttttttttttttgttaaaaattttggatttgaagtataggaaatttatttttagtgttgtagtggggggtggggggatgatgtttttgtttttttgtttggtatgttgtagtggattttgtgttaaggaaaggttattggtttaagatagtgtgagggaaaattatttttttttttttttttgtagtaagtttggttatggtggttttagtatttattttatttttgagtttggtagtatttttattttgtttttagtgatattttggtgggttgtattaatatagttatatgttggttatgtgtgtttatatttagttaattggtgggtttttgatgggaatggggagtgttttggtttgtatttagtggattatatagttgtttttttttttgttttttgatttgtattttgtagtggggtatagggttttgtttaattgtatagtttgtttagttttagttttgtattttttgggggtatgtttttgtggttttagtttttagtaagtaaggaagttgatggtagttgatatgtatagtaaagagttgggggaggtttgtagggtagaaggattagtataagatgttggaggtgggagggagagtaataaattatattttgattgttatgatttttgtagtatagagaaataataatattaaatgaattataatgaataattttatattataagttattgagttgttagagtgatgatttgttagatagattatttgaattatatttgaattaaaaatagttattagaaaagttatgttagtagtttagtagtggagattagaattttggaagtttgggttgtttgagttgaagttttatttttgttattttagttttgtaattttagttatttaattttttagtgttttaattttttgttgtataaaatgggaatagaagtatagaatagaggagttaatatatatgaagtatttagagtagtttttgatatatatatagaagtgttgttagttattataaatttgaggttttaatgtagtattttaatgtaaattttatattgtatttaaattgaattaggtgatgtttaaatttttaattttatgaggttgaaggataaaatttaaattgttaagaatatataaagttaaatttaaattttggtttaaatggggggaaattagtttttattatttatttaaaatttaaaaggatattatattttaagttttttttgtttgttttttgagatagagttttgttttgttattaggtgagtgtagtggtgtaatttttgtttattgtaatttttattttttgggtttaagtgatttttttgttttagttttttaagtagttgggattataggtatgtgttattatgtttagttaagttttgtatttttagtagagatggggttttattatgttggttaggatggttttaattttttgattttgtgatttgtttattttggtttttttaagtattgggattatatgtgtgagttattgtgtttggtttaaatttaaagtt

SEQ ID NO: 284 - DNA, 2501 bp, Artificial Sequence
  chemically treated genomic DNA (Homo sapiens)
ttatatggttagaaagggtttaggtggtttttggtgtttttttagtttttgtttttatggtgtatttttttgttagttgtttttttttgtattttgttgtttgtttggtttggttgtgtgtggttttttgggagtttttattttgttgtggattttagtgattattaagtttgtatgtggtttgttgtaggtttgagtagaaggttttgtgtatatttattgtgttgtggttgtgtgggaggtttgtgttgtttgtgttatttattggttgggttttgtgggtgtagtggagtgggtgggtggttggtttggatgtgttttttttggttgtggttttgtgtgttatgtgtttttggtgggatgtgttatttttgggtttgttgtggtgtttttaatttgggttagggagtggggtggagggggtggttgggtggtttagaggagggtttttttttttttttttttttgaatgaattgtgtgatgttatgtataggaaattggttgggttgtgtagagaatgaagtaagaggataggtattatagttttgtttttgtttttttttttttgtgtttgtttttttgtgttgtttgtttgtttgtttgttgtgtttttgtttgttgttttttgtggttttgttgtgttgttgttgttgttgttgttagtagaaggtgttggggttttgggttttttttgttggtggttgttagtgtttggagtgggttgtgtggtgggagttttgggaggtggttgtagttagtgttgttgtgtaggattaggaggaggagaaagggtgtgtagtttggaggtggggtgtgttggtggggtgtagtggaagagggggtttaggggggagaattttgtagtagttattttttttaggaaaagagggaaaaaataaaatttttttttattatttttttttttttattttttgttgtattatatatagtgtgggtttttagtgtttggtattggtgggttaggtgtgttttgtttttatttatttagtagttttttggaaaatgtatttgttgtttggagtttaattagaagaggatttttgtttttgtttttggtttttttattgtttttttttttttgttttttttttggggaggtgtgaagtggttttgtggatagagatttatgtttgtgtttgtgtgtgtgtgtgtgtgtgtaaattgttgagaaggggaaaatattataggatttttgtgaatattggattgaaaattgtaatttatttgttgttgttgttgtttttttttttttttgagtttttgagatttttggttgggatttttgtggattgatatttttgtgaagtagaagtttgggaattgatttggaaatttttttaatttttattttttttttttgtgatttttgatttattgggaagttttaaattagttataattggagagtgttgaagattgatgggattgttgttttatgtatttgttttggttttataaaaaggaaatttgatagaggattatgttgtatttaaaaaatataagtaagttttttgtataggaaattggtttaatgtaatttttaatggaaatttttgagattttttatttaaagtgtatttgagtaaatttaatttttaggtagtttaatatattttttttagttgtgttatttgtagtgtgtatgttttgtttttatttagtgtgtatagggaaatgtatttgattttttatttattagtttgttttttttttaattttttagtattatagaggaagtagattgatattaataatatttattaataataatgtgttttatgaaataaagatttgaaaggaattggaataaaaattttttgtattttatgttaagggggaaatattagaattaagtgttttgtgtgattgaagatatttttttgtttaagaatgtaaagtatatttaataaaatagttggattataattttttttttttttttgggggttgtggggtgggagttggggtgagaggtgttgttggtttttgttgttttttttttgggaaggatggtgtatgttgggagaatagggtatgataattgggagatagtgatgaagtatatttattataagttgttgtagaggggttatgagtgggatgtgggagatgtgggtgttgtgtttttgggggttgtttttgtattgggtattttttttttttagtttgggtatatgttttatttagttgtattttgggatttggttgttaggattttgttgttgtagattttggttgtttttggtgttgttgtggggtttgtgtttagtttggtgttatttgtggtttatttgattttttgttaggttggtgatgattttttttgttgttattgttgtgattttgttgagatgtttagttagttgtatttgatgttttttattgtgtggggatgttttgttatggtggtggaggagttttttagggatggggtgaattgggggaggattgtggttttttttgagtttggtggggttat

SEQ ID NO: 285 - DNA, 2501 bp, Artificial Sequence
  chemically treated genomic DNA (Homo sapiens)
atgattttattgaatttaaagaaggttataatttttttttagtttattttgtttttgaagagtttttttattattgtggtaaagtgtttttgtgtggtgaagggtgttaggtgtagttggttggatattttggtgaagttgtggtggtagtggtgggagaagttgttgttggtttggtggagggttaggtggattataggtggtattgggttgagtgtaggttttgtggtggtgttgggggtagttggggtttgtagtggtgaggttttggtgattgggttttgggatgtggttggatggggtgtgtgtttgggttgggaggagaagatgtttggtgtgggggtggtttttgggggtgtggtgtttatattttttgtattttatttgtagtttttttgtgatagtttataatggatgtattttattattattttttggttattgtattttgtttttttagtgtgtgttattttttttagaggaaaagtaatgggggttaatggtattttttgttttagtttttattttatggtttttagagaaagaagaggagttataatttagttattttattggatgtgttttgtatttttggatgagggggtgtttttaattatgtggaatatttgattttggtgttttttttttggtatgagatgtaggaaatttttattttaattttttttggatttttattttatgaggtatgttattattagtaagtattgttaatattagtttattttttttgtgatgttgaaaggttaaagaaaaaataaattaataagtaaaaaattaggtgtgtttttttgtatatattgagtgaaagtagggtatatatattataagtaatatggttaaaaagaatgtattaagttgtttggaaattaaatttatttgaatgtattttaagtaaaaaattttaaaggtttttattgaaagttatattaaattaattttttgtgtagagaatttatttgtattttttaagtatagtatgattttttgttaagttttttttttgtaaaattaaaataaatgtataaggtaatgattttattaatttttagtattttttagttatagttgatttgaaattttttaatgaattaggagttgtggggagagggagtaaaaattaggaggatttttagattgatttttagatttttgttttatagaaatgttaatttgtaggaattttaattggagattttaagagtttgagaaaaaaaaaaggtagtggtggtggtagatgaattataatttttagtttggtatttgtagaagttttgtgatgtttttttttttttggtaatttatatgtgtgtatatatgtgtgggtataggtatgaatttttatttatgggattgttttatgtttttttaggagagagataggggagaggggatgatgaaggagttggggatggaggtaggaatttttttttgattaaattttgaatagtaaatgtattttttgaaaagttgttggataaatgaaggtaggatgtgtttggtttgttggtgttgagtgttagaagtttgtgttgtgtgtggtgtggtgaggggtggggagaaggaggtggtgggggagggttttattttttttttttttttttaaaaaggatgattgttatgaagtttttttttttggatttttttttttgttgtattttattggtgtattttgtttttgggttgtgtatttttttttttttttttggttttgtgtggtggtgttggttatggttgttttttggagtttttgttgtgtagtttgttttgagtgttgatggttgttggtagggagggtttggagttttggtattttttgttggtagtggtggtggtggtagtgtggtggggttatggagagtggtgggtgggagtgtggtgggtgggtgggtaggtggtgtggaggggtgggtgtgggaggaagggggtgggagtggggttgtggtgtttgtttttttattttattttttgtatagtttgattggttttttgtgtgtaatgttatatggtttatttaaaaaaagaagaaagaaagagtttttttttgagttatttgattgttttttttgttttgttttttggtttgggttaaaggtgttgtggtaggtttgggagtggtgtgttttgttgggggtatatggtgtgtggggttgtggttggggagggtgtgtttgggttggttatttgtttgttttgttgtgtttgtggggtttggttagtgggtggtgtgggtggtataggttttttgtgtggttgtggtgtggtgggtgtgtgtggggttttttgtttaggtttgtggtaggttgtgtgtggatttggtggttgttggggtttgtgatggggtgggggtttttggggaattgtatgtggttgggttgggtggatgatggagtgtggaggggggtggttggtgggagggtgtgttatgaaaataagggttggaaaagtgttgggaattgtttggattttttttggttgtgtga

SEQ ID NO: 286 - DNA, 6104 bp, Artificial Sequence
  chemically treated genomic DNA (Homo sapiens)
tagttttgaagtaggtagatatgtttatatttttttttgagttagtgtttggatttaggggattagattttttatttgatatggtagagagataagttatgttttaggtttttaaaaggagtttggaaaatataattaatttaagttaaatatttttattatttttttgtatatataataaagataaaaatatttattttattaaattgttgagagtaagaaagataatatatatatagtgtttggtatatggatggaatttagttgatggtagttataatatttataatattttttttttgttttaatttaatatgatttatatgattttttatatttattgtatatgtaatattttttagataattttatatttaggttattagtaaaatattgatattttttttagtatttatatagatgttttttttttaaagtttttagtaaaatttttattggggaattttagttgttttttatttttttttttttttatttttatttttatattaaaggtttttatttttaaggtatataatatgatattttgatatatgtatattttgtgaaatgattgtaataattaagttaattaatatattattattttatatagttttttgtgtgtgtgtgtgtgtgtgtgtgtttagagtttttgagatttattttttttgtaaattttaagtatatgttaattatagttattaggttgtatattaggtttttagaatttatttattttataattgaaaggttgtattttttaattagtattttttttttatttttaattgtagttttaaataattattattttaatttttgttattgagtttgatttgttttttgagattttatatataagtgagattatgtattatgtgtttttttgtgttttatttattttgtgtgttataatattttttaggtttagttatgttggtataaatgataatattttttttttttgaataatattgttgattaatattttattgtgtgtgtgtgataaatatatattatattttttttaataatttatttattaatggatatttaggttgtttttgtattttggttattgtgaattttgttgtttttttggtagttatttttgtatttttttttttagaagtagttttattgtagtttaaaagtgttttaggaaaatgatttagaagtaattattttttttggtatgttttttagtaaatatgatgatggaaagttttgatttttgtttttttttaaatagtgtaattgatttttagttgggattttttttagttaatttgatagttttatgtttttattaggttgaagaaaatgtatgtgttgtgggttgttgtattattgttgttggtggtgttgttgttattgttgagattttgtggttgagtttatattataaaggaattgtagagtagtaataaatttaatttgagttttgaatttaagtttttaggtgtgatttttttaattatgtggaaatttatgtaagaatttttaattagattttatgtttatttttattttttaagtaaagggtataggaatttggtttaaatgaatgggaataaatattatagttagattttattggagtgttgtaaaaatgtttttttttaaaattagattgttttaaaattgattttggtttttagatttttaagttaggaagtaagatagtaaaaattaagggttaaatagttaagtgattatttttttaaaattagtattttttttggtgatttttgttagattatgttttgtttagtattgaaatttagagaagttttaggaatagtgggatgaaatttaagtgatttgtttatgggaagttttattttttttttgtttgtttagtaaatttgggatgggtttagagaatgattttgtattttgtattagaagattttagtttttagagagaattttagatgaaatttttatttttttgttttatttttgaaaatttttatttgggaattgatttgttgtgataaataaaatgggaggagtttggttgaatagtttgtggattttggaaagtaaagtgaaatgttgttttaattaggtttgaattttttgtaagttattttgtgaaattggtgaatttgttagaatgaatttttatttatttaattttggtggattgtttattagggtgtttggtatggtgttaattgttggagaaaatgatttttaaataaaaatgaaaaaaatttttggtttttagtaaggagttaggtaatttttataaatttaaggagtgtttgagaggtgagttaatgattgttttttttgttttaaagagatagatttttatagttagttttgaaattgtttggggttatattagtgttttttggatgtagattttggttagtgttttatggtattagtttttgatttgtagttgttaaagatttgatagtggggagtatgtgtttattttgaaggttgaagatatatattatagttaggagtagaattttgattttttaaagtgatatggttataaaatttgtgtttattggtttttattttgtggttattgtggtatgggtgaaagttatgaattttttttttaggaaaatatatattatagatatatatatttataaatggttttaggaggtttttatgttagaaatttttggttttggaaaaaaattatttttgttgaagtatgtggtagttgagtgtaaatatttttttgttatagttttagtggtagaggtttaagtattatgttttatttagtgtttgtattgtggtttttgtaattttttaagtagttttgtattgaaaatttaggttggagatttgagtttaaattgttgaaaagttttaaggttttggatagggttttagtaggggttatttttttttaggatttggggtttattgtgtttaagatttgttatttaagttttgttttgtgtgtatgttgtttgttttatgttttgtgttgatatgtgttggtgtttttttgggttagttttagttttgggttttgtggttgttttgttggtgattttgtggagagtgagttttagatatttagtttttagttttgagttgttatttttttgttgtagttaagaaggaggagattaattaagggtattttagaagttaggtgtttttgttgttttttttgagtatggaggttattaattttttagggggaagagatgtagtgtgaggtaggggtgttgtgttaagaaattttgatgtttttggggattgaggataaaggtgtggatatgattttggggtatttggagttttgtgatttgtgttatggatggtatatttaggggttaatttttgttttgttttaaagaattttaagttagagtttttgtttttgtttatagttttgggatgttgttgttgtgtttattgtataggtagtgtttggattggttgtagtagattgtgtgttgtgtgttttattgggagatggtggagatgttgaaaagttttttttttgttattttggatgttgtgggtggtaagtgttttagtttttatttttgttgagttgaatgtttaggtatagtggaattgaaatttggttttgtgggatgtgagagttgttgaggttatgtgtaattgggtgtgatggagggtgtttgtttgtgatgtgtgtaggtttgatgtaagtaggttattgttgtgtgagtgtgtggatgtgattgtttgagagatttggaggtaggtttgggatatgtttgagtgaatattttaggatatttttttggttagtatttgttttttagtgtttgtgatttagagtgggtatatgttgggagatagtaatgggtttgggtgtgtgtaaatgagtgtgattggaagtgagtgtgagtttgatttaggtagggattatatagtattgttatatttgtttgttttttagtagaggattgaagtgtgggggtgggggtatggggttggaatagaatgtttttgggatattttggtaaatagtagttggaagtaaaggggtagttgtgtaaatggtttaggtaggtgatggatggtagggtaggaagggggaggtttagaggtttggatggaggtttttgtatttgtattttgtaatttattttttaggtttagtaggttattggttttttttttatatatgtaatggatttgaagagtattttgggatagtttggggagatggagatttggaaagtatttatggagattttatagaattttttgtgtggattaggaaatttttgtagatttttgtttatttgaggtttaggtgttgggttgttttttataatatttttttaagatgagattgtggtttttattttaaagatgagtatattgagtttttgtgaagttatttgtttatgattatataattaggaattgggttaattgtaattgaatttttgtttaataaagtttttgtttttagttttgttttttgttttttatgagttttggttttttgtgggtaatattagttattggagttagattttttgggtttagaatttatttttaggggtattaatttttaaaattttatttgggtaggggtttgggattagagttggaagagtttttataattttggattttttttgttaaattgtgaaattaggggtggagtggggtgagggtttaaaattaggttggattgagaggtgaaatttattatgatgttaaattgtttttaaatttttgtttattttaagggtgttatttgttggtgtttttattattttttattatttttattaatgattttaatgtaaatataagtgggatggttttgttggattttttaggttttggaagtatgagggtgatgtaatttaggggtaaaggatttttttgtttattggttgttgtgtattggtggaatttttttgatttatagtggtgggaataagagtagttgttggtgttgggaggtattagagatattgtttagtttaagtgttgttgttgtttttatagggttttgttggatgttgttgttgttgttgttattgtttttgatttaagttattttttgttaggtgagttttgagattttggtttaggtatatgtttttttttttttttttttttatttgttatttttttattttttttttttttttttttttttttttgttagtttttttattagatagtttttgttagtttgtgatttatattaggtttgtgttttaggttggattggatagttttaattttttggtttgttttttttgtttggttgtggattttagttttatttttttgtattgtatataggtttaggttagttttgggatatttaggttttttagggattgtgtatagagtttgaggtaagagaaattttttgtagatggtgtgattagggatggtgtttggagtttagtagttttagggaaattggtttagaatttggaatagagtggatgggtggtaaataggtatgatgattgagggataagtagttttaaattgtaagttttagttataggttttgggagtaaagagagaaagttttgggttttaatttaagagtaaaatttggtttttgtaggggattgaggtgttagtaggtggagtttaggttgagtattaaaattgatttttttattttttagattttaattgtagagataatttttgtggatagattttattttttttattaaggtgtatgtaaaagttttagaagaggaggatagttttgggtttttttatgggattagtttttgtgataggggtttgggagtatgttttttatagagatttggttaataggtttatatgtatttgtgtggttttggggagaagggtaggattgagattttttttatttagttttttttttaggattgtttttttagttttattagattgtgtatgttataggtttattgaattttttagaagtttattgtgttgatgaggaaataaaaaagaagagaaatataatgattagtttgaagttataaagttagagtgttagaagtaagatagaaaattaggataggagttaaggtttgtgggtttttagaattttgaattggtgtaggtggtttattttattttttttttgtaga

SEQ ID NO: 287 - DNA, 6104 bp, Artificial Sequence
  chemically treated genomic DNA (Homo sapiens)
tttgtaagggaagaatgagataaattatttgtgttagtttgaagttttaggagtttatagattttggtttttattttggttttttgttttgtttttaatgttttggttttgtggttttagattggttattatatttttttttttttttgtttttttattagtatagtggatttttgggaggtttagtgggtttgtagtatgtatagtttgatagagttggaggagtgattttagagggagagttgagtgggggaggttttagttttatttttttttttaaagttatatagatatatataaatttgttagttaggtttttgtggaggatatgtttttaggtttttgttatagaagttgattttataaggaaatttagagttgttttttttttttggggtttttgtatatattttggtgggaggggtgggatttatttatagagattatttttgtaattggaatttgagaaataaaagaattaattttagtgtttagtttaagttttgtttgttggtattttagttttttgtaggaattaagttttatttttaaattgggatttaagattttttttttttgtttttagagtttgtgattggggtttgtagtttagggttgtttgttttttagttgttgtgtttatttgttatttatttgttttgttttaggttttgaattaatttttttgggattgttgggttttagatgttgtttttgattgtattgtttgtggaaagttttttttgttttaggttttgtgtgtggtttttggggagtttgagtgttttgagattggtttaagtttgtgtgtagtgtgagagagtaagattggagtttgtagttgagtaggaagagtgagttgggggattgagattgtttgatttaatttagggtatgagtttggtataaattgtggattaatagagattatttgatgaagagattaatggagagagagggagaggaggaaagggagtgagaaaatgatgaatggagggagagggagggagagatatatatttgagttaggattttggggtttatttggtgggaggtggtttggattagaggtggtggtagtggtggtggtggtgtttagtagagttttgtggaagtggtggtgatatttgggttgggtagtgtttttgatgttttttagtgttagtgattgtttttatttttgttgttgtgggttgggaaagttttgttagtgtatagtaattaatgggtggaggggttttttgtttttgggttgtgttatttttatgtttttagaatttggaggatttagtaggattgttttatttgtatttgtattgaggttattgatggaaatggtgggggatggtgggggtattaataagtaatgtttttaaagtgagtgggaatttgagggtagtttgatgttatggtgaattttattttttagtttggtttggttttgaatttttgttttattttatttttggttttatgatttggtggaaagggtttaggattgtagggatttttttaattttgattttagatttttgtttaagtgagattttaaaggttaatgtttttaagggtgggttttgggtttaagaaatttgattttagtagttggtattatttatagagggttagggtttgtgggaaataagagatggagttgggagtaagaattttgttagataggagtttaattatagttggtttaatttttggttgtgtgattatgggtaagtaattttatagaggtttagtgtatttatttttgaaatggggattataattttattttgaaggaatattgtgagaaatagtttagtgtttgggttttagataggtagggatttataagagttttttggtttgtataggggattttgtaagatttttatggatattttttgaatttttatttttttggattgttttggggtattttttagatttattatatgtgtgaggagggggttgatgatttgttgggtttgaggggtgagttgtaaggtatagatgtggaagtttttatttagatttttggatttttttttttttattttgttatttattatttgtttgagttgtttgtatagttgtttttttgtttttggttgttgtttgttaagatgttttagagatattttattttggttttgtatttttatttttgtattttagttttttattaaagagtaggtaggtgtgatagtgttgtgtggtttttgtttagattaagtttatatttgtttttggttatatttatttatatatatttaaatttattattgttttttaatatgtgtttattttgaattatagatattaaaaaatagatattggttagaagagtattttgaggtgtttatttaaatgtgttttaagtttgtttttgagttttttgggtggttgtatttatatatttgtatgatgatgatttgtttgtattaaatttgtatatattatgaataggtgttttttattatatttaattatgtgtgattttaatagtttttatattttgtagaattgggttttagttttattgtgtttgagtgtttagtttagtagaggtagggattaaggtgtttgttgtttatagtgtttagagtggtaagaaagaagttttttagtgtttttattattttttggtggaatgtgtagtgtgtgatttgttgtagttggtttgggtgttgtttgtgtggtgagtgtagtagtggtattttggggttgtgggtggaggtaaggattttagtttgaggttttttgaggtagagtagaaattagtttttaggtgtgttgtttgtggtgtgagttatggaattttaggtattttggggttgtgtttgtatttttgtttttagtttttagaagtgttgaaattttttagtatgatatttttgttttgtgttatattttttttttttagggggttggtggtttttgtgtttaaaggaggtagtgggaatgtttaatttttaagatgtttttaattgatttttttttttttaattatagtgagggaataataatttggggttggggattgggtatttaagatttgttttttgtagggttgttggtagggtggttataggatttgggattggaattggtttgggaggatattggtgtgtgttagtgtagagtgtgaaataggtaatgtgtgtgtagagtagggtttggatggtggattttgggtataatgagttttggattttgaaggaagataatttttgttgagattttgtttggagttttggagttttttagtagtttaggtttggatttttggtttgggtttttggtgtagagttgtttgaagagttgtgaaggttgtagtgtgggtattgagtggggtgtagtgtttgggtttttgttattggggttgtagtagaagggtatttgtgtttagttattatatattttagtggaaatgatttttttttaagattagaggtttttaatataagaattttttgaaattgtttgtaagtgtgtgtgtttgtgatgtgtgtttttttaaagagagagtttatagtttttgtttgtgttatggtgattgtaaaatgaaagttagtagatgtagattttgtggttatgttattttgaggggttggaattttatttttgattgtggtgtgtgtttttagtttttagaatagatatgtattttttattattaaatttttggtagttataaattaaaggttggtgttgtggggtgttaattagagtttgtgtttagagggtgttagtgtagttttgagtagttttaagattgattgtaaaagtttgtttttttaggataggagggatggttattaatttattttttaagtattttttgagtttgtaggaattgtttggttttttgttgggggttgaaagttttttttgtttttgtttgaaaattattttttttagtaattagtattatgttaggtattttagtagatgatttgttaaagttaaatgaatgaaaatttattttggtaaatttattagttttataaggtagtttgtagaaaatttggatttagttagagtggtattttgttttgttttttgaaatttataaattatttagttagattttttttattttatttgttatagtaagttggtttttaggtagaagtttttaggaatgaggtagggaagtaaggattttgtttagggttttttttaaagattgagattttttggtgtaaaatgtgaagttattttttgagtttattttggatttattgagtgagtgaaggaagggtagagttttttgtgagtggattatttagattttattttgttatttttggaatttttttgagttttagtattaaatagagtatggtttaatggaagttgttaaggaaaatgttgattttaaaaaaatagttgtttgattatttgatttttgatttttattgttttattttttaatttaaaaatttggaaattagggttagttttgaaataatttgattttggaaaaaaatatttttataatattttaataaagtttaattgtaatgtttgtttttatttgtttagattagatttttgtattttttgtttaagaaataaaaataaatatgaagtttggttgaaaatttttatgtgaatttttatgtgattaaaaaagttatatttgaaggtttgagtttagagtttaagttaaatttattattgttttataatttttttataatatggatttaattataaaattttagtagtagtaatagtattattagtaatagtaatataatagtttataatatatatattttttttagtttggtagaaatgtggagttattaaattaattggaaaaaattttaattgaaaattgattgtattgtttaaagaagggtagaaattaaagttttttattattgtgtttattgaagaatatgttaagagaagtagttgtttttgaattatttttttaagatatttttagattgtagtaaagttgtttttggggaagggagtatagaaatggttgttaaagagatagtgagatttataataattaagatatagaaatagtttaagtgtttattgatgaatgaattattaaagaaaatgtggtgtgtgtttattatatatatataatggaatattagttagtagtattatttagaagaaggaaatattgttatttgtgttaatatggttgaatttggggaatattatgatatataaaataagtgaggtatagaaagatatgtaatatatgattttatttatatgtagaattttaaaaaataagttgaatttagtaataaaggttagaatggtgattatttggggttgtggttgggggtaaaagagaaatattagttaaaggatataattttttagttataagatgagtaagttttggagatttaatatatagtttggtgattatagttaatatatgtttgaaatttgtaaagagagtagattttaagagttttaagtgtatatatatatatatatatataggaaattatgtgaggtaatgatatgttaattaatttgattgttgtaattattttataaagtatatatgtattaaaatattatattgtatattttaaaaataaaaatttttaatatggaaataaaagtgaaaaaaaaaaagagtgagagatagttgaaattttttagtgggaattttgttgaagattttagaagaggggtatttgtataaatattgaagaggatattaatgttttattaataatttagatatagaattatttaaaagatgttgtatgtgtagtaagtatgaaaagttatataaattatattaaattgaaataaagaaaagatattataaatattataattattattaattaagttttatttgtgtgttaggtattgtgtgtatattattttttttatttttaatagtttaataagatagatatttttatttttgttgtatatgtaagggaatagtaagagtatttggtttgaattaattatattttttaggttttttttgaggatttgaaatatagtttatttttttgttatgttaggtaagaggtttggttttttggatttaggtattgatttagaggaagatatgggtatgtttgtttgttttagggtta

SEQ ID NO: 288 - DNA, 5976 bp, Artificial Sequence
  chemically treated genomic DNA (Homo sapiens)
agaggggtattttttattttaatttgaattttatgattgtattttttgttaggagatgaaagggataagattgtttgaaggattaatttttagtttttaggtaggttagtggttaaaatatttaggaagtgaaagtttgttttttgttataaggaaatttggagtttgtgattttattatgtggggtttgttatttgttaggtgatagggttttttatttatttgtggtgatttgaagggtaaggtttttggttaaatattttttttttttagtgatgtttgaaattttattgttagtgttggattttagtaagattttagagaaagtttaatttttggagtttgggttttttttagttgagatgttaggaaagtaatgggttttattatttgtatggataggtttgtgtatagttttaggggatttagggattttattagagtttatttatagatattaggttaaaagttttggatagtatttataatttttttgaaagaagaaaagtttttttttagagttttttttaaagtgtaaatggttttgggaggtttgaaatgatgagttggttggtatgaaagaattttttttagtagatgtaagagataatttgaggagttttagtggtgggggtgggggaaggagagtttgggggaggggaggttttaggtagtttataattttttttagaattggaaagggaatgtattgggttaagagggttaattatttatttttgtagagtgtttataagaattttatgaattaagtgttattaatatttttattttatagatgaggaaattaagatggtggagataaaatgatttatgttttttaattaatggtagagttagaagtgaatttaggttggagtgaagtggttttagtgtttaaatgatttttttattttagtttttagagtagttgggattataggtatgtattgttatgtttagttaatttaaaataatatttgttggggagatggggttttattatgttgtttagattggttttaaatttttgggtttaagtaatttttttattttttaattagttttttaaagtgttgtgattatagttgtgagttattaggtttgtttaggtatttttgtttgatataagagaaaatagagggtaggtatagtggtttatatttgtaattttagtattttgggaggttgaggtaggtggattatttgaggttaggagtttgagattagtttggttaatatggtgaaattttgtttttattaaaatataaaaattagttagatatggtgatgtgtgtttgtaattatagttatttaggaggttgaggtataagaattttttgaatttgggaggtagagagtgtagtgagttgagattgtgttattgtattttagttggggtaatagagtaagattttgttattaaataaataaataggaaatagagaagtaatttagtgtgttgtgaaagttatatagtatttgttttttataaggagtttttttgtgtttttgttttattttggatatttgatttattgtttttggagtttggagaaggatttgttgagaagtttgaagaatgtattaggtttgatttgattttgttgtttttaattgttttttaaaattttttttattgaattattagagtgtaatggaagagttgatgagagttgttgtagagttatgaggttaaggtttgttgggtagaagaaagtaaagttttaaaggtttttagggtttagtgatggtataaaatatgtatttttatataattgagaggaaaaaaataagtagatagtatagttttatgggggaaatgtttttttttgtatttttattattttgtttaaggtatgattttagtgggaaaggaaatattggagttttttttttttgagttttttggtgggttaagagtagagggagttaaaatatgatatttaaaagatttgattggaaatttattaaaattgaggggataggttgttggggggggtggtgttgggttgtttagaaattgtttgtatttgagaaattatttgatggatttagaggtatttttagttttgggtgaaatattttaaatatggttttttttaggaggaagtgaaataggggttgggttttttgaaagagtaatttttattttaaatatttattgagtagttgttatgatgagttaagaattttgtttagtgattgtttttgtattagtttatgttaatttatttatataaaggagaatattgatttttttaaggttatagggttagtgagtggttgattttatttaatgttgtgtagttttaattatgtttgaaggataaagggaaaggaggtgtttttgttggggtagataagttatttagatgtggttggttatagggagttagatagggaagttgtttaatttaatatttgtttgtttattttgtttttgttttttgatggaggatggtgggtgttggagggttattggtttaggatttgagatttttggtttttatttattttatttttgattttaaaattattttattggggatagaattttttggagaaggtgatggtggttatggtgtggttgtggtattaaaagttttattttgggggttagaagattttgggttttggtttttggttttgatattgatttgtttatgtgatattgaataagttatttgtaaattataggtttgggtgaattttaaaggttttttttaggttaatattaaaaaatagattgaaaattgtagttttagttggaagattgggattatatgagatgaagttgattgttagaagaaaggttttggaattagagaggttggttttagttttgtgttattttttattggttttaatttttttaagttttagttgtttatttattatatgggaataataatatagtttttgggttgttttgaaatgagtttaaatgagttggttagtggttgggtatggtggtttatgtttgtaattttagtattttgggaggttgaggtaggtggattatttgaggataggagtttaagattagtttggttaatatgatgaaattttgtttttattaaaaatataaaaattagttagttgtggtggtgtatgtttgtaattttagttatttaggaggttgatagaggagaattgtttgaatttaagaggtgaaggttgtagtgagttaagaatatattattgtattttagtttgggtgatagagtaggattttgttttaaaaaaaaaagagttggttagtgttaaatgtttagtatagagattggtatagtaatttttaatgtttagtatttattgttattattttttttttttttttttttttgagatagagttttgttttgttgtttaggttggagtatagtggtgtgattttggtttattgtaagttttattttttaggtttatgttatttttttgttttagttttttgagtagttgggattataggtgtttattattatgtttggttaattttttgtatttttagtagagatggggttttattgtgttagttaggatggttttaattttttgattttgtgatttgtttgttttggttttttaaagtgttgggattataggtgtgagttattatgtttggttttattgttattatttttattttttatttttgtatagagtatttatggtttaagaaatatttgttattttaattgtatgggagttttataatagtatagggagatatttttgattattatttttattaggagggtggagaaattgaggttttgggaggtggttttgatttagggaattaatttgttgatttattaatttatgaagttttatagttaaaaaagattagattaaaaaatgagaatttagtaaaggggttgaggtaggaggattgtttgagtttagaaatttgagattagttttggtaatatagtgagattttttttttagaaaaattttttaaaaaattaggttgtttgaggtagagtgtagtggtttatgtttgtaatttaatattttaggaggttgaagagggtggattatttgaggttaggagttttagattagtttggttaatatggtgaaattttgtttgtattaaaaatataaaattagttggtgtggtggtatatgtttgtagttttagttatttaataggttgagataggagagttttttgaatttggtaggtggaggttgtagtgagttgagattgtgttattgtattttagtttgggtaagatagagtgagattttgttttaaaaaatataaataaaataaataaataaaaaattaggttgttagtttagtggtttatggtttatatttgaaattttagtattttgggaggttaaggtaggaggattgttttagtttaggagtttgagattaggttgggtaatatagggagatatagtgtttttattgtttttgtttgttttgatttgtttttttataaaaaggtaaaagaaaaaaaaattagtttggtgtggtggtgtgtatttgtatttttagttattagagaggttggggttagaggattgtttgagtttaggagtttgaggttgtagtgagttgtgattgtattattgtattttagtttgggtgaaagagtgagattttatttttaaaatgaataaataaaaaattttaaaaaataaaagaatttagttaagtgtaaaagttttttttgattttaggttttagtgagttattggtggggttgggatttgaatttagtggaattagaattgtgtaggttttataatttatttagattttagtaattttaggttagagggttattgtgtttatgtgaggttgggtgggtgggttgttagttttgttttggggaggggtttgtgttgttgattggttgtggttggtaggtgaatttttagttaattagtggtatggggggtggtgtttttggggtttatttggttgtagttatgtatttttttttagtggtgttggaattgtaaagtatttgtgagtttgtggaagttagtttagattttagtttgttttagtttggtttgatttgattgtatttggtgtttgtttttgtttggtgtttttggttagttatgggtttttggagttgtagttttttggtgttgttgttgttgttgtaggtattttggattttttgatttgtgagggatgtatttgggttgtaagttttgtgttttagttttgtgttttttttttttttgttgttattgtttttttttttttaagaaagtttgggttttgaggagtggagtggtttggaagttttgtgtgttttggattttttagtgatgggagtggggggtgggtggtgaggggtgagtgtggtttttttgttttttttagtgtagattgaggtgggggtgtttggttgtggagtttgtggggtgggtttgtgtgggtggtgggggtgtgaagtggggtgtagggggtggggtgtggagaaggggtgttttggtgtaagttgagggggagttaggagttgtggggatgatttttgagggaaggagaggggtatttgtagaaataaaggtatttgttatgttaagaaaggttgtaaataggagtgagggttttggggataagaaagtgaggttggaggaggtgggagtgttttttgttttgaggagtggtgtatttttggtttaaggaaagtggggtattggagaataaagatatttttaataaaatgagaaaggagattgaaagggaatggtgggttaggttttgagggggtgatttggtggtttttttttgggagtttttgggggtttggtggttgtaggttttggggtgggggagggtgatgttgttgtttgtttgttttggggttgtgggttggggtttttttttaattttgatgttgggagtgagggaggggtggtgttgttggttttggtgagtaggagggaattttttgagttatttggttttatttattttttttttattttagg

SEQ ID NO: 289 - DNA, 5976 bp, Artificial Sequence
  chemically treated genomic DNA (Homo sapiens)
tttggggtgggggaaaggtagatggaattgggtgatttggagggtttttttttgtttattgaaattaatagtgttgttttttttttgtttttggtgttgggattgggggaggattttagtttgtagttttgggatgggtgggtagtgatgttatttttttttattttgaaatttatggttgttgagtttttaggaatttttgggagggggttgttgagttatttttttaagatttagtttattgtttttttttagtttttttttttattttattggagatgtttttattttttagtattttattttttttagattgggaatgtattattttttagagtgaggggtgtttttattttttttgattttatttttttatttttgggatttttatttttatttatgattttttttggtatggtaggtgtttttatttttatggatgttttttttttttttttgaagattgtttttatgatttttggtttttttttgatttgtattagggtattttttttttatattttattttttatattttgttttatgtttttattgtttgtgtgagtttattttgtggattttgtggttagatgtttttgttttggtttgtgttggagggggtaggaaagttgtgtttgttttttattatttattttttatttttattattggggggtttggagtgtgtgaggtttttaggttgttttgttttttaggatttgaatttttttggaagaagggaagtggtgatgatgggagaggaaggggtgtagggttggggtgtggagtttgtggtttgaatgtgttttttgtaagttaggggatttggggtatttgtagtagtagtagtagtgttgagaggttgtggttttaagggtttatggttggttggggatgttgagtgagggtaggtgttgggtgtggttgggttgggttgggttggagtgggttggagtttgaattgatttttgtaagtttataggtgttttgtagttttgatgttattgagagggggtgtgtggttgtagttaggtgagttttggaggtattgttttttgtattgttgattggttgagggtttatttgttggttatagttaattagtagtgtggatttttttttagggtggagttgatggtttgtttatttggttttgtatagatgtggtgattttttagtttggagttgttagggtttaggtgggttatgggatttgtatggttttgattttattgggtttgaattttagttttgttggtggtttattaagatttgggattagaaagggtttttatatttggttgagtttttttgttttttgggattttttgtttgtttgttttggagatggggttttatttttttatttaagttggagtgtagtggtgtgattatagtttattgtagttttgaatttttgggtttaagtggttttttggttttagtttttttagtagttgggagtataggtgtatattattatgttaggttaattttttttttttttgtttttttgtagagagataagttggggtggataggggtagtgggggtgttgtgtttttttgtattgtttagtttggttttgaatttttgggttgaagtgatttttttgttttggttttttaaagtgttaggattttaggtgtgagttatgagttattgagttagtagtttaattttttgtttgtttgttttgtttgtattttttgagatggagttttgttttgttttgtttaggttggagtgtagtggtatgattttggtttattgtaatttttgtttgttgggtttaagagatttttttgttttagtttattgagtagttgggattataggtgtgtgttattatattggttaattttgtatttttagtatagatggggttttattatgttggttaggttggtttggaatttttgattttaggtgatttattttttttagttttttgaagtgttggattataggtgtgagttattgtattttgttttgagtggtttaattttttaaaaaatttttttagagaggggattttattatgttgttgaggttgattttaaatttttgaatttaggtgatttttttgttttagtttttttattgagtttttattttttaatttagttttttttaattgtagagttttatgggttagtgagttagtaaattgattttttaggttaggattattttttaaagttttagtttttttatttttttaatgggaataatgattagaaatgtttttttatgttgttgtgggatttttatataattaaaatgataaatgttttttgagttataaatgttttgtatagaagtgaggggtaaaaatagtaataatagggttaggtatggtggtttatgtttgtaattttagtattttgggaggttgaggtgggtagattatgaggttaggagattgagattattttggttaatgtagtgaaattttgtttttattaaaaatataaaaaattagttaggtgtggtggtgggtgtttgtagttttagttatttgggaggttgaggtaggagaatggtatgaatttgggaggtggagtttgtagtgagttgagattgtgttattgtattttagtttgggtgatagagtaagattttgttttaaaaaaaaaaaaaaaaaaaaaatagtaataataggtgttggatattgaagattattgtgttagtttttgtgttaagtatttgatattgattagtttttttttttttgagatggagttttgttttgttgtttaggttggagtgtaatggtgtgtttttggtttattgtaatttttgttttttgggtttaagtggtttttttttattagttttttgagtagttgggattataggtatgtgttattatgattggttaatttttgtatttttagtagagatagggttttattatgttggttaggttggttttgaatttttgtttttagatgatttatttgttttagttttttaaagtgttgggattataggtatgagttattgtgtttagttattgattagtttatttaagtttattttaaaataatttaagagttgtattattatttttatatgatagatgggtaattgaagtttagagagattgaggttaatgagaggtggtgtaggattggaattaatttttttgattttagggttttttttttaataattagttttattttatgtggttttagttttttagttggagttgtagtttttagtttgttttttgatgttgatttggaagagatttttagagtttatttaaatttatgatttgtaaataatttgtttaatgttatataggtaggttaatgttaaagttaaagattaaaatttaggattttttgatttttagagtggggtttttaatgttatagttatattatggttattattattttttttagagaattttgtttttagtgaaataattttaggattaaaaatagaatagataggggttaaaggttttaggttttgggttagtggttttttagtatttgttgttttttattaaaagataaaaatagaatagataggtaaatgttaggttagataatttttttgtttgattttttgtggttagttatgtttgggtggtttgtttattttgataagggtattttttttttttttattttttaagtatggttagaattatatagtattaagtggagttagttatttattagttttgtgattttggggaagttagtgtttttttttgtataagtgaattggtatgagttaatataaaaataattgttaagtagagtttttggtttattatagtaattgtttaataaatatttggagtaggggttatttttttaaaaggtttagtttttattttgtttttttttggggaaagttatgtttggaatattttatttagagttaaaggtgtttttgagtttattaagtaattttttaaatgtagatgatttttgggtagtttagtattgttttttttaataatttgtttttttaattttaatgagtttttaattaggttttttggatgttgtattttggttttttttgtttttaatttattaggaggtttagagggagaaggttttggtatttttttttttattaggattgtgttttgaataagataatggaaatatagaaagaggtgttttttttatggggttgtattgtttgtttatttttttttttttagttatgtaaaaatatatattttatattattgttgggttttgggagtttttagggttttatttttttttatttagtaagttttggttttgtaattttgtagtgatttttattgatttttttattatattttgataatttaataaaaaggattttagaaaataattaggggtagtaaagttaggttaggtttgatgtattttttagattttttggtaagtttttttttaagttttaaagatagtagattaggtgtttagggtgaggtgggaatatagaggggttttttgtggaagataggtgttgtgtgatttttgtaatatattgaattgtttttttgttttttatttatttatttagtgataaggttttgttttgttgttttggttggagtgtaatggtgtgattttggtttattgtattttttgttttttaggtttaagagatttttgtgttttagttttttgagtagttgtgattatagatatatgttattatgtttggttaatttttgtattttagtagagatgggattttgttatgttggttaggttggttttaaatttttgattttaagtgatttatttattttagttttttaaagtgttgggattataggtgtgagttattgtgtttgttttttgtttttttttgtattaaatagggatatttaagtaggtttggtggtttataattgtaattgtagtattttgggaggttagttgggaggtgagaagattatttgagtttaggagtttgagattagtttgggtaatatggtgaaattttatttttttaataaatattattttgaattagttggatatggtagtgtatgtttgtagttttagttattttggaggttgaggtaggaggattatttgagtattggagttattttattttagtttggatttatttttggttttgttattagttgagaagtataagttattttatttttattattttggtttttttatttgtaaaatgggaatgttgatagtatttaatttataaggtttttgtaaatattttgtaaaggtgagtgattagtttttttggtttaatatattttttttttagttttaggaaaaattgtgagttgtttggagtttttttttttttaggtttttttttttttatttttgttattaaagttttttaggttattttttgtatttattggagaaaatttttttatgttggttagtttattattttgaattttttagggttatttgtattttaaagagggttttagagaaagatttttttttttttaaaggagttgtaaatgttgtttagggtttttaatttggtgtttgtggatgggttttggtggggtttttgaattttttgagattgtatataaatttgtttgtgtaggtgataaggtttattgtttttttaatattttaattggggaaaatttaaattttaggagttgagttttttttgagattttgttgagatttagtgttaatagtggaattttaggtattattggggaaaagaaatgtttggttagaggttttgttttttagattattgtagatagataagagattttgttatttggtagataatagattttgtatgatgggattatagattttaggtttttttatggtagaggatagatttttattttttgggtgttttggttattggtttgtttggaggttaaagattaattttttaggtagttttgttttttttattttttggtaaggggtgtagttatagggtttagattggggtgggaggtgttttttt

SEQ ID NO: 290 - DNA, 2501 bp, Artificial Sequence
  chemically treated genomic DNA (Homo sapiens)
tagaagtttttttttagagtgtgtttgggtatatatttaagtgtatggttgtaaatttttttttttaaagtattgaatagtattagatatttagtaggtatttaagaaatattgaatgttgtggtggtggtgagttagaagttataaaaaaaatttttttttaaaaataataataaaaagaattattttattgtgaagtttagtattataaaaatttaaataatttattataagtttttattaaaaaaaattttttttttaaagtaaatagatagataatgtttagtttatttgaaatgtttgaaagtagaggggttttaaggtagtgggagaaggtgtttgttttttgttggatatttgataattagttttttggatggtttggatgtataggagtgaaggtgtagatagtagtggggtttagagtggggttttgaggttgtgttgtggtttttttggggtttagttataattttggtttgattttagggtgaggtaggttaagggggtttgttattgtgtttttttatttttatttgggtttttatttttatagtagaggagaaagaagtttgttttttttgaggttagttgtgttagaggaagaagattgggtatgtttgggtagagatttttagattttgagtagtttgagatgttagtaattgtagttgttttaagtttgggttttgttttttagtgggatttttgtttagatgaataatttattttttgtaattttttaaaagtaaaattgtaaatgttttaggtatagaaaggaggtaaaggtgaagtttaggggaggttaggggtgtgaggtagatgggagtggatagatatattatttatttttgtgtttgttagaagaattagtagatatttttagaattgttttttatttatgttatttttataaattatttgtaaatgagggttatttggtatttttgttattttggagttatagaaataaaggatgataagtagagagttttgggtaggaggtaaaagttttgtgttttaattatagttatttttttgttgtatgatttgagttaggttattagatttttttgagttttagtttttttagtagtgtatatgggttatgtggggagtatttaggagatagataatttatttgttaaatttttttttttttggttaataaagttgttgtaattatagggattttttttgtttaggtgagtgtagggtgtagggagattggtttaatgtttaatttttttgtttttttggagattaggttgtttttttttggtagtttttttaatttttttttttttggaagtatgtgataattaataattttgtatatttaagtttagtggattttaatttttttatttgtgaaataaatgggattgaaaaattattttggttttaagatgttttgttggggtgtttaggtgttttaggtgtttttgggagaggtgatttagtgagggattagtgggaatagaggtgatattgtggggtttttttggaaattgtagagaggtgtattgtttttataatttatgaatttttatgtattaatgttatttttttgatttttttagttgtattgggtaaatttttgtttgttagagtgggttagtggtgagttagaaagggggtttattttaatagtgttgtgtttttttggagagtgttaatttattttttaagtaaaaaaagttagatttgtggtttattttgtggggaaatgtgtttagtgtattaatgtaggtgagggattgggggaggagggaagtgtttttttgtagtatgtgaggttttgggattggttggtttgttggaatttggttaggtttagttggtttggtgttgggtagttaggagtttgggttttggggagggtggttttgggtggtgtggtgggttgagtgtgggttttgtttttttgaggtgggtttgggtggggtggttgtatattagggttgtgttgagttgtgttagttgaggtgtgagtagttgttgaagttagttttttgtggagttggagttgggtgtggatttgttgaggtattgaggtatttagaggaggtgagagagtggtggtagataataggggattttgggttggtggtttagagttgagttaagtgtgtttgtgtgtgtttttgtgtgtttgtgaggatgtgtgtttgtgggtgtgtgttgtgtttataggtgtttttgtggtaggtgaatgatgggtgtgggttggtgtgtgtttggtttgtgtatatggtgtttttaagtgtgtgggtgatgagagttgggatgtgttggagattttggggtggagagtgggattataagtataggaatttttggttatgttttttgtttttggaaatttagttggggtgagggagggtgtggatgggattgttttgggagtttgtttttggttgtggttggttttaggttttaggtgtagtttgtttgtggtgtggggatgaagtttgtgtttttggaggggtttaggaagg

SEQ ID NO: 291 - DNA, 2501 bp, Artificial Sequence
  chemically treated genomic DNA (Homo sapiens)
tttttttgggtttttttagggatatggattttatttttatgttgtgagtaaattgtgtttggggtttggagttaattgtagttaaaggtgagtttttagaatggttttgtttatgtttttttttgttttagttgggtttttaggggtggggagtgtgattagggatttttgtatttgtaattttgttttttgttttggggtttttggtatattttgatttttgttatttgtgtatttagagatattgtgtgtgtaagttgagtgtgtattgatttatgtttgttatttatttgttgtagaaatatttgtgaatgtagtatatatttgtgaatatgtatttttgtggatatgtagggatatatgtgggtatgtttggtttggttttgggttgttggtttggggttttttgttgtttgttgttgtttttttattttttttgagtgttttggtgttttggtgaatttgtgtttagttttggttttataaggaattgattttggtagttgtttatattttagttggtgtagtttagtgtggttttgatatataattgttttgtttgggtttgttttaaggaggtgggatttgtgtttggtttattgtgttgtttgggattgttttttttggggtttaggtttttggttgtttagtgttgagttagttgagtttggttgagttttagtaggttagttggttttggaattttgtgtgttgtaggagggtatttttttttttttttagttttttgtttgtgttggtgtgttggatatatttttttatgaagtgagttataaatttggttttttttatttggagaatgagttggtattttttaggaggatatagtattgttagaatgagttttttttttggtttattgttgatttattttggtaggtaaggatttatttaatgtagttgaaaagattaggaggatgatattaatatataaaaatttataaattataaaaatgatgtatttttttgtaatttttagaaaagttttataatattatttttatttttattgattttttattaggttattttttttagaagtatttggagtatttagatattttaataaagtattttgaggttagaatgattttttagttttgtttattttatagatgaggaaattgaggtttattgaatttaagtatataaagttgttgattgttatatgtttttgggaaggagggaattggagagattattaaaaaagggtaatttgatttttagggaaatagaagaattggatattgaattaatttttttatattttatatttatttgaatagaagaaatttttgtggttgtagtagttttgttggttaggaaggggaggatttgatgagtgagttgtttgttttttgaatattttttatatagtttgtatatattgttggggaaattggggtttagagaagtttggtgatttaatttagattatgtagtaaagaaatgattatagttggaatataggatttttgttttttgtttggggttttttgtttgttattttttatttttgtggttttaaaatgataaaaatgttaaataatttttatttgtagatggtttatggagatgatataaataaaggataattttggaagtgtttattggtttttttgatagatatagaaatgagtgatgtgtttatttgtttttatttattttatatttttgattttttttggattttatttttgttttttttttgtgtttgaaatatttgtagttttgtttttaaaaaattgtagaggatggattgtttatttgaatagaaattttattaaaaaatagaatttaggtttggagtagttataattattgatattttaggttgtttagagtttggaaatttttgtttagatatgtttagttttttttttttaatgtagttgattttggggaggataggttttttttttttttgttgtggggatgggagtttaggtaggggtgggaggatatagtagtagatttttttggtttgttttgttttggagttaggttaggattgtggttaaattttagaaaggttatggtatagttttaggattttattttaagttttattgttgtttgtatttttgtttttatatatttaaattatttaaagggttggttgttaaatgtttagtagaggataggtatttttttttattgttttgaagtttttttgtttttaggtattttaaatagattagatattgtttgtttgtttattttggggagaaaattttttttaataaaggtttgtaatgaattatttaaatttttgtggtattgagttttataatgaaataattttttttgttgttgtttttgggaaagaattttttttataatttttagtttattattattatgatatttaatattttttaagtatttattaagtgtttagtattatttagtgttttaaaaaaaaaagtttgtaattatgtatttgaatgtgtatttagatatattttaagggaggatttttg

SEQ ID NO: 292 - DNA, 3486 bp, Artificial Sequence
  chemically treated genomic DNA (Homo sapiens)
aattaaagaggatgagattttttgtttgattttaggtgaatttttttttgttagttaggtaggaagttttgatttgaaaattagttttgggtattgttttttttattgttttttgggtattaatttttgttttttaattttagttgaattagtggatggtgatattataggtttaagatagttgtatttaaatattagtgattataggttatattaaggaaatatttgtaggtaatttagggtttgggaaggagttatttttagttatttgtaagatagtaggatttgtagattatagtataattaaatttagataaaattttgaattagtgagaattattaggaaggaaaggaatagaaaatgaattaatttgagtgttaggagatttgtatttagttttgattttggtattaattgaatgtatgtttttggataggaaatttttttgagttttgattttttttgtggtaaaaaggagagggttaaattatagggttttgagggttttttttagttgttatattttggagtgtatgagatgaggtaggtatataaagtggataagatgtggttaagaaaataagttatatattaagtttatttgtagtataggtgtttaagaaaattttgttgttgtgtaatattagaatggaaggttggtttttagtaaaatgtattaattttggtttaaattaagatgatgggtattgggtatgggggtggggaggtagttgaagatttattgagttttgttttagggtagttttgtttattgttttattttattttttattatggtgtttaagtttatattgagagagaaatttttagttgtaaaagggagaagagaaatgttggaatattagtattggatgttaggatatggttgtggtgttttaaaaattattttattatttggagtttgattttgaggggagtatttttattttttagttttttgaaagtatttattagtatttgaatattgttttgagtttgttggagtagtgaaatttggtgagagagaagggtggaggaaggaaggagttgttgtatttggtggttggatttaggtagaggaaattgttataattttgggaaagaatagaaaagtagaaagggatgagtttttatatgtagttaatgtttatggttttaattgtgtttgggaaggaagattttgggttaggggtgtatttttgttttttaaaattaaatgtgtttgagatagttataaagtttattaagggatttgagagattagagttttttgttttttttttttaattttgagttttttttttatttttattgagggagagtttgagtttatgataagtgttgtgtttatttttggttaatttttaaaagaaagatgtttgttttggttttttttttaggtttttagtttttttagggatggtagaaatttttgggttaaggttgagtgaattattgtttattgtttttattagtttttagtaaaggtatgttggtgggggggtgtttagtttttttagtaaatgttttgtggttttttttgtagattatgaggtgggggttgttggggagggttgagttgggggtagtttgttattttggtttttagtgagttgttggtgatttttgtggttttttggtttaggttttggttttttgggtgaggagtgggagggaggttggggtttaggtgttgtggtgaatttgttaatgtagtgttgggttttgaattttaggttttgttttaggtttttggttgtttggttagtttgtttgttttaattttaatttttttgaggttagttagagtaggtttgttggtagtagtatttttttagtagttatgtgattagttaattttttggtggtgtttggggaggtggtgtgtttgggaatgaggggaggtggtggaattgtgttggggttattttaaggttgtgtttgttagttttggtggggtggtttttgttgttgtaattaatggatttttttttttgtttaaatagatttgttgtgttaattatttttttttttgttagttttttttttattgttatattgggttattaaaaaaagggggtttgtttttttggggtgttttttttttttttttttgtttttgtttgtttatggttttgtgattttgatgttggtaaggtttggagagtggttgggtttgtgggatttgtgggtttgtatttgtttagatttggatgggttttgttattttttttgtttgtttggtttttttttttttttgtttttttgtttgttagtttatttgattagtggagatttggtggttgggttggggtttttttgtagtttttgtgtgtttttagagtttgggttgtggtttgttggggtttgtgttttttggttttgagggtagttgttgggtttttgagaggggtttgggttgtgtaggggtgttttgttttgtttggttttgtttttttgagagtgtgagagaggtggttgtgtagatttgggagaaagatgttaaatgtgtgagtgtttaatgggagttttagtttggagtggatggatgttaggtaggtggagtattttaagtttttggtttgtaggaatttttttggtttggtggattatgaagagttaatttgggatttggagaagtattgtagagatatggaagaggtgagttagtgtaagtggaattttgatttttagaattataaatttttagagggtaagtatgagtggtaagaggtggagaagggtagtttgtttgagttttattatagatttttgtggttttttaaaggtgtttgtaaggtgttggtgtaggagagttaggatgttagtgggagttgtttggtggtgtttttaattggggttttggttaattttgaggatatgtatttggtggatttaaagattgatttgttggatagttagatggggttagtggagtaatgtgtaggaataaggaagtgatttgtaattgatggtaatgatttttttttaattatagaatgtgtttggggttttgttttgtttgttggagggtgttaattttagtttgttttttggtgtattttgatttagttttgggagagttaattttattggttttaggtgtttagtgttatttggtttattgtttgtttgtttgtgatttttaagttagaaattggagatggtaagatttgataatttttttaatttaatatattgtggttttttttattagtaatttttaggtatgtgataaagttgggatgtttattaatggtttgttttttggttagggaaagagttttggggtggagaatgtattttttgttttttgaaaataattttattttgtgtttttaaaagttattggggatgatggatttaggattgtgggtggaggtagtgggttttttattttttgattatggggttaatttttgttagttattgttttttttaataaagattgtgtgttttttttaaaaattttttttgtgtttaga

SEQ ID NO: 293 - DNA, 3486 bp, Artificial Sequence
  chemically treated genomic DNA (Homo sapiens)
tttaagtgtaggggaaatttttaaaaagaatatataatttttattagaaaaaataatggttggtagaagttggttttatagttaggggatgaaaaatttattatttttatttataattttggatttgttatttttagtggtttttaagggtataaaatgaggttgtttttaaaaaatagaaagtgtattttttgttttagagttttttttttagttaggaggtggattgttgataaatattttaattttgttatatatttaggagttgttagtgagagggattgtgatgtattaagttagggaaattattggattttattatttttagtttttgatttaaaagttataaatagataagtagtgggttaggtagtattgaatatttaagattaataaagttagtttttttaaagttaaattagaatatgttgaaaagtaagttaaggttaatattttttagtaggtaaagtggggttttaaatatattttatggttgggaaagggttattattgttggttgtaggttgtttttttatttttgtgtattgttttgttaattttgtttggttgtttgatggattagtttttgggtttattaaatgtgtgtttttagagttagttggagttttaattaaaggtgttgttgggtggtttttgttgatattttggtttttttgtgttggtattttgtaggtatttttggggggttgtgggggtttgtagtagaatttgggtaagttgtttttttttattttttgttatttgtatttgttttttaggggtttgtgattttgaaaattgaaattttatttgtgttggtttgttttttttatgtttttgtagtgtttttttaagttttgggttaattttttgtggtttattgggttgaagaggtttttgtaggttgagggtttggggtgttttgtttgtttggtgtttatttgttttaggttagggtttttgttagatatttgtatgtttgatattttttttttgggtttgtatgattgttttttttgtatttttaaaaaaataaaattgaataaaataaagtgtttttatgtagtttgaattttttttggaagtttagtgattgtttttggagttaaaagatatagattttgatgagttatggtttgagttttaggagtgtgtaggggttgtggggaagttttggtttggttgttgagtttttgttgattaaatggattggtgagtgggagggtggagaggagaggggattaggtaagtggagagggtggtaaagtttgtttgagtttgggtgggtgtaagtttgtgggttttgtgaatttagttgttttttaaattttgttggtgttggagttgtagagttgtgagtaagtggggataggggagggggagaaaaatattttgaaaagatgagttttttttttttagtggtttaatatggtggtggaagggaggttgatgaagaagaaaatgattgatatggtgagtttatttaaatagaggaggagatttattggttgtggtggtgggagttgttttgttgaggttggtgagtgtggttttaaggtggttttggtgtggttttgttatttttttttgtttttgagtgtgttgtttttttgagtgttgttgggagattggttggttgtgtgattgttggaggggtattgttgttaataaatttgttttggttggttttggagaaattaaaattaagataaataaattagttaaatggttgggaatttggggtggggtttgaggtttggggtttggtgttgtgttggtgggtttgttgtggtgtttaagttttgattttttttttgttttttgtttgggaagttgggatttggattagaggattgtgaaggttgttggtagtttgttaggagttggggtggtgagttgtttttagtttggttttttttagtggtttttattttgtggtttgtgggggaggttgtggagtgtttgttgggggggttgggtgtttttttgttggtgtgtttttgttgggggttggtggaggtagtgggtaatggtttgtttagttttaatttagaagtttttgttatttttggggaggttgggggtttagggaagaagttaaagtgaatgttttttttttagaaattagttaggagtagatgtggtatttattatgaatttaagtttttttttaatgaaaataagaaaggaatttaagattaaaaaaaaaaaataaaaaattttagttttttaagttttttaataaattttgtagttgttttagatatgtttagttttgaaaaatgagggtatatttttggtttaggatttttttttttaagtatagttaaggttatggatattggttgtgtgtgggaatttgtttttttttatttttttgtttttttttgggattgtagtagttttttttatttgagtttagttgttaaatataatagtttttttttttttttattttttttttttattagattttattgttttaataaatttagaataatatttagatgttagtgaatgtttttagagggttgaagggtgaaaatattttttttggggttaaattttagatgatgaaatgatttttaaaatattataattatgttttaatgtttgatattagtattttagtgtttttttttttttttttgtagttggaaattttttttttagtgtgggtttgagtattgtggtggaaggtaaagtaggatgatgagtagggttgttttgagataaagtttagtggatttttaattgtttttttatttttatgtttggtatttattattttggtttgagttaaagttaatgtattttattggaaattaattttttgttttaatattatatagtagtaaagtttttttaagtatttatgttatagatgagtttgatgtgtagtttgtttttttagttatattttgtttattttgtgtgtttattttattttatatgttttagaatgtgatagttggaagggatttttgggattttgtggtttaatttttttttttttattatggaggaaattgagatttagagaggttttttgtttagggatatgtatttggttggtattggagttaggattagatgtaagttttttaatatttaggttggtttattttttgttttttttttttttaatggtttttattggtttagggttttgtttgagtttgattgtgttgtagtttgtaggttttgttgttttataagtgattgaaaatggtttttttttaggttttgggttgtttgtagatgtttttttgatgtggtttgtggttattgatatttaaatgtagttgttttgagtttgtggtattattatttattagtttaattaaaattgaaggataggggttgatatttagagaatagtaaagggggtagtgtttagaattagtttttaagttaggattttttatttaattgatagaaaagaatttatttaggattaagtaagaggttttattttttttagtt

SEQ ID NO: 294 - DNA, 8666 bp, Artificial Sequence
  chemically treated genomic DNA (Homo sapiens)
ttgtagggttttttttagtttaaagaaagtaattaggtgtttttattgtgttatgatttttatttttagttgggttttttagtttggttttaaagaataaaataaaaggtttttttgtttgagttttatttaatttattttttttatttataagaggtattttaaatttttatgatttttaaattttttaattgattattttatttttattttgtaaataagttaatttttttatttatagaaggaagtgttttaattttttttttgttttgatttttttttttttttaaatttatgtattttttgtgataaaatttataattattgttgtattttgagttttatttttttattatttttgagggattttaagtttttaaaaatattttattttgtttgtgtatttaattttttttttatttttttttaatttttttttttttttatttggtatttgtttttttaggtatatgtgtgtttaggttttttttattttttatttgttttattttatggtatagggttttgaattattataattaagttatgaaagagtagttaatgtagtgtttttatttttttgttattttattattttagttttttttttggttttttgaggagttttttataggttggtttttaggaataagtttaaatgaattatttttagtttttttaaatttttatgtttttgtatatttttttatttttgtttagaatattttttttttttttttttatttttaaatttttatattattttttaagattgggattagtttttagtatttggaagtttttgtttattagagataaatgagaatgagtttggttatttttttatttttttgtattattttgtgttttattttgtttttttaagagtattatatgttttatttaatttttaaataattgtttgaggtaagtatagttattattttaattatgtaaatgagaaaatagaggtttagatatgttgagtaattttgataaaagttaaagaattaataagtggaatagttgaggtttgaattttggtagtttgattgtagagatattatgtttgatttatttttttttgtttttattttatgtttgtttttagtttttgagtttgttgaatgaatgaataggtggtagtttttttttgttataagattgattagaattaagataggtttaaattttatgtgtagaatttttaaaattgtaaaggtagtgtaaatttaaaaaaagaatggtatttttaggaaagaggaaaagtaagtgtgagaataataataataataattaataaattttagtaaatttagtaaatgtagtaaatttttatattaaaagtttttggatatatattattatattttatggttatatgaaatatattataattttattttgtatataggaaatttgagattggtataaggagtatagagatttaggattttatatttttatttttttaggattttgtattttaggttgatatgtatgagtaaattgggagtataatgggttttttaatagaaaaattaggaaagtttttttattattattaattatttatataatatttttttaattttattattatttatattttaagttttagagtatatgtgtataatgtgtaggtttgttatatatgtatatatgtgttatgttggtgtgttgtatttattaatttattatttagtattaggtatattttttaatgttatttttttttttttttttttatataagatttataatggataatggattttaatttttagagtaaaatggttttatttaaggatgttataatttttttagagttttattgtaagatatgagatatatatatttaaaatttgtttttggtatttttaaagtagttaatttttatatttgtttataatgtatttaaatgttgtttttatatggttgtattttttattttttttattaatagttatatatattttttataagagttgaaagagtttttgatgtaggaatttatggtagagttttagagaaatttttgaatttattgaaagttttatttagaaatatatgtgtaagtgaatatattttttttaaaaaaaattattatttatttttttttttgagaagaaggtatttattttaatagatttttgaaggagtttattttttttatttttttatttttattaagaattattgtaggttgggtatgatggtttatgtttgtaattttagtattttgggaggttaaggtgggtggattatttgaggttaggagtttgagataagtttagttaatatagtgaaattttgtttttattaataatataaaaattagttgggtatggtagtatgtgtttgtaattttagttatttgggaggttgaggtaggagaattgtttgaatttgggaggtggaggttgtagtgaattgagagagattgtgtggtgttattttattttagtttgggtaatagagtgaaattttattttaaaaaaatatataaaataaataaataaaaagaaagaattattgtattagtgatggaaatgtgtttttttttttttattttggtaattatttttttttttttttattataaaatattttaaattaaattaaaataattttatttattgatagtttgaattttttttattattgttatatagttaattgagaggtattttgaggaaaatataaatggtatagtaatgtattgtagattttaataatatatttgatattttaaattgtttttattggttttattttaaaaattatatgttttaaaattaagtagatattaaaagtataagatatattgggtttataaggtttaagttaattagggattgaaatataatttttaaatagagttggattatttagtaggtagattaagtatgtgtttaaggtattagtaaagtttgagtaatttattttttaaaatgtagtatatgtttttgataagtttaaaaagtagtagttataggaaaaattagaatttttatttttttgtgtttgttatattttttagtgttgtttaatttttttttgtaagtgagggtggtggagggtgtttataatttttttagggagtaagttttttttggttttttttttttttttttttttttttttttttgagattaagttttgtttttgttttttaggttggagtgtaatggtgtgattttggtttattgtaatttttgtttttttttgggtttaagtgatttttttatattagtttttgagtagttgggattataggtatgtgttattaagttttgttaattttgtattttttagtagagatagggttttgttatgttggttaggtttgttttgaatttttggttttaggtgatttgtttgttttggttttttagaatgttgggattatagatgtgagttattgtatttggattttttttttatgtaatagtgataattttatttaaagtatttttttttttttttgagttggagttttattttgttatttaggttggagggtggtggtgtgattttggtttattgtaatttttgttttttgggtttaagtgatttttttgttttagttttttgagtagttggaattatatatgtgtgttattatggttagttaatttttgtatttttagtagagatggggtgttattattttggttaagttggttttgaatttttgattttaggtgatttgtttgttttggttttttaaagtgttgggattataggtgtgagttattgtgttttgttttaaagtattttttttttatgttttaaaataagattgtaagttagtttttaaagtggataatttaagagttaataggtattagtttaggatgtgtggtattgtttttaaggtttatatgtattaatatattatttaaatttataataatttttataaagtagggggtatttatatttttttttttttttataattatgaaaaatgtaaggtatttttagtaggaaagagaaatgtgagaagtgtgaaggagataggatagtatttgaagttggtttttggattattgtgtaattttgtttttagaatattgagtattttttttggtttaggaattatgattttgagaatggagtttgtttttttaatgattttttttttatttttttatttgtttataggtagaatttttttttgtttgtattaaataaattttatttttttagagtttgtttttatattaggtaatgtatatgtttgagaaatttttgttttagatagttgttttatatgtaggaggggaaggggaggggaaggagagagtagtttgattttttaaaaggaattttttgaattagggtttttgatttagtgaattttgtgtttttgaaaattaagggttgagggggtagggggatattttttagttgtataggtgattttgatttttggtggggtttttataattaggaaagaatagttttgtttttttttatgattaaaagaagaagttatattttttttatgatattaaatattttgatttaatttggtagttaggaaggttgtattgtggaggaaggaaatggggtgggggtggatttttttttaatagagtgaatgtatttaaatatgtttttgttggtaggtgggggagtgtggttgggagtagggaggttggagggtggtgtggggggtaggtggggaggagtttagttttttttttttgttaatgttggttttggtgagggttgtttttggttggtgtttttgggggagatttaatttggggtgattttaggggtgttatatttgttaagtgtttggagttaatagtattttttttgagtatttgtttatggtgtttttttgtttggaaagatattgtggtttttttagaggatttgagggatagggttggagggggtttttttgttagtattggaggaagaaagaggaggggttggttggttattagagggtggggtggattgtgtgtgtttggtggttgtggagagggggagagtaggtagtgggtggtggggagtagtatggagttggtggtggggagtagtatggagtttttggttgattggttggttatggttgtggtttggggttgggtagaggaggtgtgggtgttgttggaggtgggggtgttgtttaatgtattgaatagttatggttggaggttgatttaggtgggtagagggtttgtagtgggagtaggggatggtgggtgattttggaggatgaagtttgtaggggaattggaattaggtagtgttttgattttttggaaaaaggggaggttttttggggagtttttagaaggggtttgtaattatagatttttttttggtgatgttttgggggtttgggaagttaaggaagaggaatgaggagttatgtgtgtatagattttttgaatgttgagaagatttgaaggggggaatatatttgtattagatggaagtatgttttttattagatataaaatttatgaatgtttgggataaaaagggagttttaaagaaatgtaagatgtgttgggattatttagtttttaatttatagatatttggatggagtttattttttttattaggagggattattagtggaaatttgtggtgtatgttggaataaatattgaatataaattttgattgaaattatttagaagtggttgggtgtggtgttttatgttttgtaatttttttattttgggagattaaggtggggggaattatttgaggttgggagtttgagattagtttggttaataggtgaaattttgtttttattaaaaatataaaaagtagttgggggtggtggtaggtgtttgtaattttagttatttgggaggttgaggtaggagaattgtttgaatttgggaggttgaggttgtagtgaatagtgagatggagttattttattttagtttgggtgatagagtgagattttgttgaaagaaagaaagagagaaagagagagagaaaaattatttagaagtaattatatattgtgtttatttttaattgagtagggtaaataaatatatgtttgttgtaggaatttaggaaataatgagttatatttatgtgattattttagaggtaatatgtagttattattttgggaatatttgttaatatttttgtttttttattatttttagtttatttgatatagtttatttgtgataagagtttttaattttttatttttgaatagaggtgttttttttttttttatttttgttttgtgagggagttaggggaggatttaaaagtaattaatatatgggtaatttagtatttttaaaattttgttaatagtttgaatttgggagtttggttttgtagttttataatattttagaagagattttatttgtttaaaaataaaaaggaaaaagaaaagtggatagttttgataatttttaatggagaagggagaagaatatgtagaaaaggggaaatgatgttggtttagaattttaattatattggtgtttaatataggaatatttatttatataatattttaaagtattaaatttatattagtatattattaaatggatatattattaaatgggtttaagtattttatatattttaatttaattgatttattttttttttgttttggatttttattatgatttaaatatttatatatgggttattttttagattttttatattatgaaatataagaaaaatttttaaggttagttttatgattaagatgaaggattttattgaatatataaaataataaatatattgtaatattttgtttttttttttgtagttgtaatttggtttgtttatattttttttttgtttttttgaaaattgagttagttttatttttttaggataggatttaataattataatataatttagtataattttttgatttaggtaaattatgtaatttgtgtttagtatgaaatgtatttaaaaataagtaatttttttttaatattattatttttaaattaatataataaataatagttattttaaaataaattgtttatttttattatgtagtatttaaattttaaggttgttatgattgtagatagtattttaaaatttttttttggaaatggttttgtttttaagatgatttaggaattaaagaggtgattattttttgtttaatgaatttttaaattataaatttgggaagtgttttagttttttattgttgttgttataaattattataaatgtgttagttaaaataaatataaaattattattttatagttttagagattagaagttaaaaatgggtttataaggttttattttttttggaaattttaaggggtaatttgtttttttgttttttttagtttttagtgattattaaattttttggtttatggtttttgtattttttttgtggtttgtgtttttatttttgtattttttttttgattgtgattttttaataaaaatatttggggttatgttgggtttattttgaaaattttggataattttttttaagattattaattaaattatatttgtaaagttttttttgttatataagttaatgtattaaaagtttttgaggattaggatatagatattgggggtgggggggtattatttagtttattataggaaggaattttagggttaattaaattagtttttttattttatatttgaagaaattgaagttttggaattggagagtattatgttaaatgaaataagttaaatatagaaagataaatattatatgtttttatttatttgtgaaatataaaataattatatttttagtagtaaagagtagaatggtggttattagagttggggggtgggaggaatggggagatggtaattaagatataaagttttagttaagatgggaggaataagtttgattgttttttttgagatgtgttttatagtatgatgaatatagttaaatagtaaattttaaatgtttttatttgataaaaatgttaaatatttgagatgatggataggttatttagtttgatttaataattttttattgtgtttaaagattataattttatattgtattatataaatatatataattgtattattttaatatataattttaaaattaatataatgaaaaagaaattgaagtttaatatttttagaagttaagtgtaatttaaaagttttgtgagaatttgttttaataaataaataagttttttttttttaataattattatattttgtgtttggatatatagtagtgaataaaaaaaaaaaaaaaaaaaaaaatttttaggtttaatataattttaggaagaaattttagtagttgtattttaggggaaatataggaagttagtttggagtaaaagttagtttgtttttgtttttttgttattttgtttgtgttttatagtgttttttgtttgtgatgatagttttgtagaagtttggaggatataatggaatttattgtgtattgaagaatggatagagaatttaagaaggaaattggaaattggaagtaaatgtaggggtaattagatatttggggtttgtgtgggggtttgtttggtggtgagggggttttatataagttttttttttgttatgttggtttttattttggttttgattattttgttttttttggtagg

SEQ ID NO: 295 - DNA, 8666 bp, Artificial Sequence
  chemically treated genomic DNA (Homo sapiens)
tttgttagagagaatagaatggttagagttagggtgggggttggtatgatggaaaggaagtttgtgtagagtttttttattgttaagtagatttttatataagttttaggtgtttaattatttttatatttgtttttagtttttaattttttttttgagttttttatttattttttagtatataatgaattttattatattttttgaatttttgtggagttgttgttataggtagagagtattgtgaggtatgggtaaaatagtaaaggggtagggatagattgatttttattttaggttaattttttgtattttttttgagatataattattgaaatttttttttgaaattatgttaggtttggagatttttttttttttttttttttttgtttattgttgtatatttaagtgtagaatgtggtaattgttaaaaagagaaaatttgtttgtttgttaaaataaatttttataaaatttttaagttatatttagtttttgggaatgttgaattttaattttttttttattatattagttttaaaattatatattgggatagtatagttgtatatatttatgtggtataatatgaagttatgatttttgaatataatggggaattattaagttaagttaagtaatttatttattattttaaatatttgatatttttgttaaatgagagtatttgggatttattatttagttatatttattatgttatgaaatatattttaaaaaaaataattaaatttattttttttattttaattgaggttttatattttgattattatttttttattttttttattttttagttttagtaattattattttattttttattgttaagaatgtaattgttttatattttatagataagtgagaatatgtgatatttgtttttttgtgtttggtttattttatttagtataatgttttttaattttaaaattttaatttttttaagtataaaataagaaggttagtttaattaattttaaaatttttttttgtggtaggttgaataatgtttttttatttttaatgtttatgttttaatttttaaaaatttttaatatattaatttatgtggtaaaagaggttttgtagatgtgatttaattaatggttttgagggagattatttagaatttttagggtgggtttaatataattttaagtgtttttattagagggttatagttagagagaagatataagaatggaagtataggttatagagaaaatatagagattatgagttaaggaatttgatggttattagaagttggaaaagataaggaaatagattgttttttagagtttttaaaaggaatgaaattttgtggatttatttttgatttttgatttttagaattgtaaaataataattttgtgtttgttttagttaatatatttgtgataatttgtaatagtagtagtaggaaattaaaatattttttaggtttatgatttgagagtttattaaataagagatggttatttttttggtttttaaattattttggaaataaagttatttttagagaggaattttaaaatattgtttgtagttatagtaattttaaaatttgagtgttgtatggtggaagtagataatttattttaggataattgttatttgttatattagtttgaggatggtggtgttaaagaggagttatttatttttaggtatattttatattaaatataaattgtataatttgtttaaattaaggaattatattaaattatattatggttattaaattttgttttgagaaagtgaaattgatttagtttttaaagagataaagagaaagtataagtaaattaaattgtagttataaaaagaaagataaaatgttgtagtatatttattgttttgtgtatttaatgaagttttttgttttggttataaaattagttttaaaggttttttttatattttatagtatgaaaaatttaaaaagtaatttatatgtaaatatttaaattatgatagaaatttaaagtaaaaagaaaatgaattaattgaattaaaatgtgtaggatgtttaaatttatttgataatatatttatttgataatatattaatatgaatttagtattttaaaatgttatataaataaatgtttttatattaaatattaatgtagttaggattttaagttaatattatttttttttttttatatgttttttttttttttttattaaaaattgttaaaattatttattttttttttttttttttgtttttaaataaataaggttttttttaagatattgtaggattataaagttaaatttttgggtttaagttgttggtaaaattttagagatgttaagttatttatgtattaattatttttaaatttttttttaatttttttataaaataggagtagggagaggagaaatatttttgtttaaaaatgaggaattgaaaatttttattataaataaattatattaagtaagttaaagatagtaaaagagtaaaaatgttagtagatatttttaaaatggtaattatatattatttttggaatgattatatgaatgtggtttattattttttaagtttttatagtaaatatatatttatttgttttatttagttaaaaataaatataatatgtagttgtttttgaataattttttttttttttttttttttttttttttttttgataaagttttattttgttatttaggttggagtgaagtggttttattttgttgtttattataattttagttttttgggtttaagtgatttttttgttttaattttttgagtagttgggattataggtgtttgttattatttttggttattttttgtatttttagtagaggtgaggttttatttgttggttaggttggttttgaatttttgattttaggtgattttttttgttttgattttttaaagtgaagggattataaggtgtgaggtattgtgtttggttgtttttgaataattttgattaaaatttatatttgatatttattttaatatatattatagatttttattgataattttttttagtaagaaagataagttttatttaggtatttgtgaattggaggttaagtagttttagtatattttatatttttttaagattttttttttattttaaatgtttgtaaattttgtatttgataaagagtatatttttatttaatataaatatgtttttttttttagatttttttagtatttgagagatttgtatgtgtgtggttttttattttttttttttggttttttaagtttttagggtgttgttaggaggaggtttgtgattataaattttttttgaaaattttttaggaagttttttttttttttggagaattgaagtgttatttgattttaatttttttgtaaattttgttttttagagttgtttgttattttttgtttttgttgtagattttttatttatttggattggtttttgattgtaattatttggtgtgttgggtagtgtttttgtttttagtagtgtttgtattttttttatttgattttgggttgtggttgtggttagttagttagttgaaggttttatgttgttttttgttgttggttttatgttgttttttgttgtttgttgtttgttttttttttttttgtagttgttgagtgtatgtggtttgttttattttttggtgattagttagttttttttttttttttttttggtgttggtggaagagttttttttgattttgttttttaaattttttggagggattgtggtatttttttaggtaaggggatgttgtgagtgagtgtttggaggaggtgttattaattttgagtatttagtgaatgtggtatttttgaagttgttttaggttgggttttttttgggggtattagttggaagtagtttttgttagagttagtgttggtaaggaaggaggattgggtttttttttatttgttttttatattgttttttggtttttttgtttttagttgtgtttttttgtttgttagtaaaggtgtgtttgagtgtgtttattttgttaaaaagaaatttgtttttgttttgttttttttttttgtgatataatttttttaattgttaaattgaattggggtgtttggtgttatagggaaagtatggtttttttttttaattataagaaaaagtaaaattatttttttttagttgtgagagttttattgagaattgaaattatttgtatgattagaaagtgtttttttatttttttaatttttgatttttaggagtgtggggtttattaagttagaaattttagtttaaaggattttttttggagagttggattgtttttttttttttttttttttttttttttgtgtgtaaaatggttgtttggggtaagggttttttagatgtgtatattgtttggtataagagtagattttgaaaagatgaggtttatttaatatggatgggggagaattttgtttgtaggtagataggaaaatggggagggagttattggaaggatggattttatttttaaagttataatttttagattagaaaaagtgtttagtgttttagaagtagagttgtatagtgatttaaagattagttttaaatattgttttgttttttttatattttttatattttttttttttattgaaaatattttgtattttttgtaattataaagggggaagggaatatgagtgttttttgttttataggggttgttgtgagtttaaatgatgtattaatatatataagttttaagaatagtgttatatattttaagttaatatttgttagtttttgaattatttgttttgaggattggtttgtaattttgttttgaggtatagaaagaaaatgttttggagtaggatgtggtggtttatatttgtaattttagtattttgggaagttgaggtgggtagattatttgaggttaggagtttgaggttagtttggttaaaatggtgatattttgtttttattaaaaatataaaaattagttggttatggtggtgtatgtgtgtaattttagttatttaggaggttgaggtaggagaattgtttgaatttgggaggtagaggttgtagtaagttgagattgtgttattattttttagtttgggtgatagaatgagattttgatttaaaaaaaaaaaaaaatgttttggatagaattattattattatataaaaggaaagtttggatgtggtggtttatgtttataattttagtattttgggaggttgagataggtggattatttgaggttaggagtttgagataagtttgattaatatggtgaaattttgtttttattaaaaaatataaaattagtggggtttggtggtgtatgtttgtaattttagttatttggaggttgatgtaggagaattgtttgaatttaggagaaggtggaggttgtagtgagttgagattgtgttattgtattttagtttgggagataagagtgaaatttggttttaagaaaaaaagaaagaaagaaagaaagaaagattaagaagaatttattttttgaaaagattatgggtattttttattatttttatttataaagaaaagttaaatagtattaaagagtataataagtgtaaggaggtaaaagttttaattttttttgtgattattattttttaagtttattaaaaatatgtattatgttttaaaaaatggattgtttagattttgttgatgttttaagtatatgtttaatttgtttattggataatttagttttgtttaaaagttatattttaatttttggttgatttaaattttgtagatttagtatattttgtatttttagtgtttgtttgattttaaaatatgtagtttttaaaatgaagttaatgaaaataatttgggatgttaagtatgttattaaaatttataatgtattattgtattatttatattttttttggggtattttttaattagttgtgtagtaatgatagggaaaatttaaattattgataaataaaattattttagtttagtttaagatattttatgatggaggaggaagaaagtggttgttaggatgggagggagggaatatatttttattattaatataatggttttttttttttgtttgtttgttttgtgtgtttttttgagatggagttttgttttgttgtttaggttggagtgaaatggtattgtatgattttttttggtttattgtaatttttgttttttgggtttgagtaatttttttgttttagttttttgagtagttgggattataggtatatgttgttatatttagttaatttttgtattattagtagagatggggttttattatgttggttaggtttgttttgaatttttgattttaggtgatttatttattttagttttttaaagtgttgggattataggtatgagttattgtgtttggtttatagtggtttttaatgggggtgggagagtgggaagagtaggtttttttaagagtttgttgaaataaatattttttttttaaaaaagaaagtaggtaatgattttttttaaaaaagatgtgtttatttgtatatgtatttttagataaaatttttagtgaatttagggatttttttgaaattttattatggatttttatattaagaatttttttagtttttgtgaaaaatatatatagttattggtgaagaagatgggagatgtaattatataaaaataatatttggatgtattataaataggtgtaaaagttgattgttttggaaatattaagaataagttttagatatgtatattttatattttgtagtagagttttggaaggattatggtatttttgggtggggttattttgttttagaaattgaagtttattatttattataaattttatgtaggggggaggggggagggatagtattaggagatatatttaatgttaaatgatgagttgatgggtgtagtatattaatatggtatatgtatatatatgtaataaatttgtatattgtgtatatgtattttaaaatttaaagtataaataataataaaattaaaaaaatattatgtaaataattaataatagtgggaaaatttttttagtttttttgttaaagagtttattatatttttagtttatttatatatattgatttgaggtgtaaaattttagaagaatgaaaatataaagttttggatttttgtgttttttatgttagttttagattttttatgtgtaaaatgggattataatatattttatgtggttataaaatatgataatgtatgtttaaaagtttttaatgtaaaaatttattatatttattaaatttattaaagtttgttggttattgttattattatttttatatttatttttttttttttttgagaatgttattttttttttagatttgtattgtttttgtagttttgaaaattttatatgtgaaatttaaatttgttttaattttgattagttttataataaaaaaagattattatttgtttatttatttaataagtttagaaattaagggtagatatggggtgggggtagaggggagtaggttaaatatagtatttttatagttagattgttagggtttaaattttaattgttttatttattggttttttaatttttattaaagttatttaatatgtttgggtttttgtttttttatttgtatgattaggataataattgtatttgttttaaatagttgtttagggattaaatgaagtatgtaatgtttttagaagagtaaaataaagtatagaatgatataagaaaatgaaaaggtgattaaatttatttttatttgtttttagtaggtaaaggtttttggatgttgagagttgattttagttttgaagaatgatgtgagagtttaaagatggaaaagaaggagaaagatattttaggtagaggtaagaggatgtgtaaaggtatagaagtttaggaaaattgaaagtaatttatttagatttatttttgaaaattagtttgtgaaggattttttagagagttaaaagaaaaattaggataatgggatggtaaggaagtggggatattgtgttgattatttttttatagtttggttgtgatagtttaaggttttatgttatgaagtgaggtagatggaaggtggaggagatttgagtatatatatatttggaagggtaagtgttaagtgaagagaagggaaagttagaaaagaataaaagaaaagttaagtatataggtaagataggatatttttgaggatttgaggttttttaaaaataatgaagaaatagaatttaaagtatagtggtggttatagattttgttataagagatatatagatttgggagggagaaaaggttagaatggggaggaagttgaggtatttttttttatgaatgaggaggttagtttgtttgtagagtgaaaataagatggttggttaggaagtttgagaattgtaaaggtttggaatattttttatgagtagagaggatgggttgagtaagatttagatagagaagttttttgttttgttttttaaaattagattggagaatttagttgagggtggagattatgatatagtagggatatttgattattttttttaaattaaagaaagttttgtag

SEQ ID NO: 296 - DNA, 2501 bp, Artificial Sequence
  chemically treated genomic DNA (Homo sapiens)
gaaaattaggttgagtaggttggttttttaaagaaatttattgagtttttataatgttttttttatttgatgggagaaaaggggttttggaagattaagtgtgaagttttagaattttgtttggagttggttaggattatttaggtttgagtataagtaaagtgttgtttgtggtgttagtaagtgtgaatgtttttggtaatgttttttttatttaaagttgttttttatttagttaatttgttttgtgaagtttatatatttgttttgtgtaagatttttagttattttatttagttattggttttttttttattattattttttatgttttttttaaagaaaaatattattttttatttttttattaattttaaatagtttttatttttttgatatatttattatttaagaaaatggtttaagaattgggttagattattttgttttaatttttttgataagttttagagaaatttaaaggttaaaataagagtataagagtaaaaggtagagaaattaagaaattgaagattaggaaatgggggttggatgggaaagaaaaagaaattgttattaatgttatttggtttttttttttgtttaggtggattttagttttgttgaggttttgttagtagatttttagttttaattagtatttttatggtggtggtatttttattgtttttaaaagaaagagttttttttaattttatagggatttgggggatgaggagttagagttaaggtattttaaaaaaaatatgtgaagatttttattttgtaatatataagtaattgtttttttgttaagattttgttttttttagtattttgaattaaaatgattttgtaaataaaaattgtttatttttaggagaggtttatttatgtagttttttattaaagtttttaggtaataaatttataatttgtggttttttttttatttaatgtagtatttgttgaaatgttttaaatattttaagtaataaatgttgatttaaatttatttaggaagattaggaaggggaaaaaaagtatttggtatttaaatttttagaagagaatttaatgataggtttagtttgtttaatgataagtttagtattatattttttttttatgatgttttattattattgtataaattttttttattatttatgataaataaaaataagatatttgataaagtgggtttaaataggtaagagtgtaaataaagatttattgtataaatatgatgaaattgggattttagatttttaaagtataatttttttttgttttatgtgtgttaggttgttatttttaattttgaattagttttttttttttttaagggttgtatttataatgtaaaaatggaaagaattaaaaagtatatgtaaaatatgatttttgggatttttttttatttttatggttgattaatttaaatagaaagatatatttaagagaaaattgttaagtttgatataagttatgaaatttgtgaagtttaagtattgtttggggatgaatttaatttgtatgataggtgtagagttgttgtttttagatattttaagaaatatggagttattttgaatgatttttttttggttataagggagttattaatgtttttatagtgaaattaattggttggttgaaggaatagaaattttttgttttgtttattggggattaggagttgagggtagtggtgaatatttttaaaatattagttttggttttattggatatttagtgagtagtgtagttagtatttttggtggttttttggtttagtttttggtgtatgtgttttagtatttttgggtaggtttttttgtttttgtgatgtgttggtttgggtttggttttttggtgattatagtggatagggggtggagtttaagggggtggggagatgttggttttttggtttagttgaaaatggaattttttgttggttggttttttattttgttagagtgaggtggggtagtgaggattttgtgatgtgtttgtattttgtggttagagtggttttgagtttggttgtgtttgtgttaggtgtttttttttagaagtaatttaggtgtgtttgttggtttttgagtgttaggaaaagtttggagttaatgattggttgtttggttattgtatggggttttaagttgtagaaggatgatgggagggtaatgaagttgagtttaggttttttaggaaggagagagtgtgttggagtagtgtgggaaagaagggaagagtgttgttaagtttatggttaatggtggattatttgggttgttgtgtgtttgggggttgtggaatgtgtgaggagaataagggtatgtttagtgggggtggtagtgatgagggtttggttagtgttgtggtgtggggattagtggagaaggtgtgatagtttttggaagttggtgtggattttaatggagttaattgttttgggaggtgtgtgatttaggtagttggggttttagggt

SEQ ID NO: 297 - DNA, 2501 bp, Artificial Sequence
  chemically treated genomic DNA (Homo sapiens)
gttttggggttttagttatttggattgtgtgttttttgaaatggttgattttgttgggatttgtgttggtttttaggagttgttgtattttttttattagtttttgtgttgtggtgttggttagatttttattgttgttgtttttattgggtatgtttttgttttttttgtgtattttgtagtttttagatgtgtagtggtttggataatttattgttggttgtaaatttaatgatatttttttttttttttttatgttgttttggtgtatttttttttttttaggagatttgggtttagttttattatttttttgttgtttttttgtggtttggggttttgtgtagtggttgagtggttggttgttagttttgggttttttttggtgtttaagaattagtgggtgtgtttggattgtttttgggaaaaagtgtttagtgtggatgtagttgagtttaaagttgttttggttgtagggtgtggatgtgttgtggagtttttattgttttgttttgttttggtagagtggggagttagttggtaaagaattttgtttttagttgggttaaggggttggtgtttttttatttttttaggttttgttttttgtttgttgtgattgttgggaggttaggtttgggttgatgtgttatgagggtggggaagtttgtttaaagatgttaggatgtatgtgttagagattgggttagggagttgttaggaatgttggttgtattgtttgttggatgtttagtaaagttaaggttaatattttgggaatgtttattattgtttttagtttttaatttttagtaggtggagtagaggatttttgtttttttagttagttagttggttttattgtggagatgttggtggtttttttgtgattgagagaaagttatttaaaataattttgtgttttttaagatgtttgaaagtgatagttttgtatttgttatataagttaaatttatttttaggtagtatttgggttttataagttttataatttgtattaaatttagtaatttttttttggatgtgtttttttgtttgaattagttaattataaaaatagagaaaaattttgagaattatgttttgtgtgtgttttttaattttttttatttttgtattatggatataatttttaaaagagaaaaaaattagtttgagattgagagtggtaatttggtatatataagataaaaaaaaattatattttaagaatttgagattttagttttattatatttgtatagtaaatttttgtttgtatttttatttatttaaatttattttgttaggtattttatttttatttattatgagtaataaaggaaatttatgtagtaataatgaaatattataagagaggggtgtggtgttgggtttgttattaaataggttgaatttgttattaaatttttttttgaagatttaaatgttaagtgtttttttttttttttttaatttttttaggtgagtttgaattaatatttattatttaaaatatttaaaatattttagtggatgttatattggataggaagagaattgtaagttatggatttgttgtttaaaaattttggtgaggaattgtataagtggattttttttaaaagtgaatagtttttgtttatagaattattttggtttggagtgttgaggaagataaagttttaataggagggtaattgtttgtgtattgtaaaatgagagtttttatatgttttttttaggatattttagttttgattttttattttttaaatttttgtagaattaaaaaaagtttttttttttaaaggtagtggaagtgttattattatggaagtgttggttagggttgaaaatttattgatagagttttaatagagttgaaatttatttggatagggaagggaattgggtagtattaataataattttttttttttttttatttaatttttattttttagtttttagttttttaatttttttattttttatttttatgtttttgttttgatttttgagtttttttgaaatttattagaaaagttaggataagatagtttgatttaatttttgagttatttttttaggtagtaaatatgttagaaaaatgaaagttgtttggagttgataaggaaatggaagataatgtttttttttgagggggatataaagaatggtgatagggaaagaattaatgattaagtaaaatgattgagaattttgtatgaggtagatgtgtgagttttgtgaagtaagttgattgaatgaaaaataattttgggtagggaaaatgttgttgggggtatttgtgtttattagtattatggatagtgttttgtttatatttaggtttgggtggttttaattagttttagatagaattttaaagttttatatttgattttttaaagtttttttttttttgttaaatagaaaggatattatggaagtttaatgaatttttttgaaaaattaatttgtttaatttggttttt

SEQ ID NO: 298 - DNA, 2501 bp, Artificial Sequence
  chemically treated genomic DNA (Homo sapiens)
gtgttttagtttttgaatttatgttgtttgttattatattgtattgtttgtggatgatttatttgtttttgtagttttatttgaagaatttttttttttttttttttgaggtttgttttaaatattattttttttgtgaagattgtttggtgttttttaggagagagtgtgatttttttttttaggaatggtagtattttaaatatatatattttgtagtatattttattttgtatggtaatggtttgtttgtgagttttattttgtattagagggtgagggttttgaagatagtgttaggttttatttattttgatattttataatatttattatatgtttgatgaatgaatgtatagggggatggttgggtgtattttttttaattttttaattttttgaaataaataataaaattttatttttttttagaagttttggtatggttttttttattttgttatagttattgataattatttttattttttgtgtaatttattaggtaagaagtttatgtagatttatttttagtagtttatatgataaataaatattgtgtttgatttttaaatattaaattatagtatattatagatagatatagagttattatttaaagtatgatattttaattttaaaaggttttttttgaagaatattataaattttttttttttttaagatttgttgggtaggaaagatgggagaaaatgaattaatgtttatatagaaaggaggataatgggggtaaaaataatagatgaatgtatgggtggatgagagaatggataaaatgataggtggatatgttgattttggatagatgggaaatgagtggatatattaataaatagatatgtgggtggatgggtggagaagaggatggtggatggttgtggttttatgaagagatgtgaaaaaggaagtgtggaatgatggatgagaagttgtatgggaagatgaatagaagaataggtggttgaataaattaaaaggtgtgtggttggatgaatgaatgagtgggatgatagatggatttaagtggttagtggatggataggaggatggatggatgtgagagttttagaaggatataaggaaagatgggtggatagatggatgggtggatggaaggatatttaggaggatgaatgagtatgtgtgtggagagaggtgtttatttatattggtttgaatatatgggttagttgagttaaatgttagttttatgataggttattagtagttttttttgagttgttttgttaagaagttaaaatttatttaagttatgtggatttgttattgaggggaaaaagaatgagttttttttttttttatttggaagatttattaattttttattttttattttttattgtgggtatggaggtattgtgttatttagggtaagattttgttttttttttagttttttttttaggatatttaatattttgtgaaatttagagattttgttttagttggatttagagaaatttagtgggaaaggagaggttaaaggttgaatttaatggtgtaaggttttatggtttggttattttttgttttgatgttgtggggttagtgggagaagaaagttagtgtgtttttgggtgtaggggttagtggggtttggaggtataggtattttgtgatattttaggttttttgatttatgtttttggtagttttgattatttatagttttagtagagtatggggtgggggtagaggggtttgtttgggagggttgttattttttaaaatttttgtgggttgtttagttatagttttttttgtttgggtgtgttttttgtttgttttttttttttgttttaggttattgtttttaattttgaataaaaattgtagttaatttttgaggtagttttattgtttagtggattttagtttttgttaggtttggtttgttatttttgttttgttttttgttggtttttgttttgtgtttagggattttttagttttttttgtttgtgttttttgtttgttttggatattatggataagttttggtggtatgtagtttggggattttgttttgtgttgttgagtttggtgtagattggtgagtgtttgttgtagtttgggtagtaagatgggtgtggggtgtttagtgtggatttggtggtagtttttttggttgagttggttttgggggattggagttaagtgagttgtttgtgaagtgtattgggttttggaaagtagggttgggatttgtgttaaattgttggagaatgtgtttgtggaagtattatttggttgaaagaaaaagagaaagagaagaaagtttgttgggtaggttgttggtgtgtagttttgggtgaggttgttagagttgtagtatatggtagaaagtaattgtttttttggatgtgtatagttgttgtttggattaataggtttttgtgtttaagggtttgttaagttttattgggttgtgtttaggtagggtagagttgggtggggta

SEQ ID NO: 299 - DNA, 2501 bp, Artificial Sequence
  chemically treated genomic DNA (Homo sapiens)
tgttttgtttagttttgttttgtttagatatagtttggtggggtttggtgagtttttgggtataggagtttgttagtttagataatgattgtgtgtatttgggagaatggttattttttgttatgtgttgtagttttagtgattttgtttaaaattgtgtgttggtagtttgtttaataaattttttttttttttttttttttttttaattaaatggtgtttttatagatatattttttaatggtttagtgtaaattttagttttgttttttggagtttaatgtattttgtagatagtttatttgattttagttttttagggttgatttagttggaggggttgttgttgggtttgtgttgagtattttgtatttattttgttgtttaggttgtggtgggtatttattgatttgtgttaggtttagtggtatgaggtagagtttttaggttgtgtgttattaaaatttgtttatggtgtttggagtgaatggagggtgtgggtgaaaggagttggaggatttttgggtgtggggtaggggttggtggaggatgggatgaggatggtggattgaatttggtagaggttggggtttgttgggtaatgaggttgttttggaagttggttgtagtttttatttgaggttgaaaatagtgatttaagatggagggagggagtgagtgaaggatatatttaagtaaggggggttgtgattaagtagtttgtagaggttttaagaagtagtagtttttttgggtgggtttttttgtttttgttttgtgttttgttgaggttgtaaataattggggttgttagggatgtgggttggggaatttggagtgttgtggggtgtttgtgtttttgagttttattggtttttgtgtttagagatgtattggttttttttttttgttggttttgtggtgttaggatagaggatgattgaattgtaaaattttgtattattgggtttagtttttggtttttttttttttgttaaatttttttgaatttggttggagtaagatttttgggttttataggatgttggatattttgggagaggagttggagagagggtgaggttttgttttgggtggtgtagtgtttttgtgtttatagtggggagtgaggggtggggagttggtgaattttttaagtggaaagagggagagtttattttttttttttttaataataagtttatatggtttgaatgaattttagttttttggtagaatagtttagggaaagttattgatggtttgttatagggttggtatttggtttagttaatttatgtgtttaagttagtgtgaatgggtatttttttttatatatatgtttatttatttttttaaatatttttttatttgtttatttatttatttatttatttttttttatgtttttttggggtttttatatttatttatttttttgtttatttattaattatttaggtttatttattattttatttatttatttatttaattatatattttttaatttatttaattatttatttttttatttatttttttatataattttttatttattattttatatttttttttttatatttttttataaaattataattatttattatttttttttttatttatttatttatatatttgtttattgatatatttatttattttttatttgtttaagattaatatatttatttattattttatttatttttttatttatttatatgtttatttattatttttgtttttattatttttttttttgtgtaaatattaatttatttttttttattttttttatttagtagattttaaagagaggaagagtttgtaatattttttaggggaagttttttgagattgaaatattatattttgaatgataattttatatttatttataatatattatggtttaatgtttggaaattaaatgtagtatttatttgttatgtgaattattaaaagtaaatttgtatggattttttgtttggtgagttatatagaaaatgaaagtgattattagtggttgtggtaagatgaaaggaattatgttaggatttttgagggaaggtaagattttgttatttattttaagaaattgaaaagttgagagaaatgtatttagttatttttttatgtatttatttattagatatgtaatgagtgttgtggggtattgaggtaaataagatttggtgttatttttagagtttttattttttggtatggaataaaatttataagtaggttattattatgtaaggtgaaatatgttgtaaaatgtgtgtgtttggggtgttattatttttagagaagggagttatatttttttttggagaatattaggtagtttttataggggaagtgatatttgaggtaggttttaaaggaaaaggaggaggaattttttagatgaaattatagggataagtaagttatttataggtagtatagtgtagtgatgaatagtatggatttaggagttagaatat

SEQ ID NO: 300 - DNA, 16579 bp, Artificial Sequence
  chemically treated genomic DNA (Homo sapiens)
tgttttttaaaatgatgtttagttgaattagttaatggagataaaaatatttatatataatttttttttaagtttattagttattttatagattagttataattttggttattttaatgagttaatttttttttagagatattataaattttttaaagatggaaaataattgttatttttttgaataatgtttattatttaaaataatgtatataaaagttgtttaataaatttttgttgaattgagagaaaatataaaaaattgaaagtagtttgtttgtaataagtgtttgttaagttttatagatttttttttttttttggaattattgtaataaatatttgatttttgatttgtaggattaaaatgtgattttttatattttaataggagtaagtattagttttgtaattttttttgttaatagaataaaaatggaatgtatgtttgttgtttttatatgttggttgatatttatgttgaatattttttttataatgtagaggtttttttgttttttgttttgtgttttatttttgtttattatagagatattaatgatgttatgtgtttttttgtattattagtgtagtagtttttattatgttttttgttttggttttattgtagtttaattaaataaatggaaatgggtagttattgaaaataaatagtaattgtaaaagttttgttttttaagaaattttttgtattgtattttgttttgttttattgattttaagatttttattgtttttttgtgtttagaaattagattttttagtttgttttgttttagttagataaatgttttataaaaatgatttatattttttagattgtggggagagaagaaaaagattttgagaaagtgattaaggagggagtaagagtgatataatttttgatttaatttagttggattgtgttttttatgtttttatttttttttttataaaaaagatagtgtttttgatgttttgttttaggtagttttttagggtgagtgtagatgtgttgagttatttggttgttttgaggattggtttagagagtttttttttttattaatgaagttatttttttttggtagtttggttttttttattattttatgttggaatttggttttggtttgtatagttttgttgtgatgtagatggttttttagttaagttttagagaaatttgtttaattatgaataggatatttatagtataggagaaaaaaaaatttattaaaataaatattttattgtaatattttgatttgggggttggagagtaaaaatttaatatttgatgtttgggaaaaatttaatgttttatggttttttaaggaaatttgtttgtgtttaatttattagagtaatttatatattttgggttaaagtataatgagattgttattattattttgttttttgtaagattttttttttaagaataaaaagaaggtaataaagattttatatttttgttttttttagaaagttaaagagaatttaaagtgttggatgaaatgtttgtttttaatttgtagtgttttatttaaaaaaaaaattatgatataattttagaggataggttttttttttttagggtttttgaaagttaaaagtatatttttaatttgtagtattattgtattatttagtgaggataatttgtttagttgtgtttaggattagttagattaaggagttgaaattaagttttttttgaatttgaatgggattggaattttgttatttttagagtagtaatagatgatgttatgtttaagaatattttatttgattaataaaaaaggagaagtttgaaatgtaattttaaagaattttagaaggaggtttagatgaagataataaaattttttggagatatatttgttatttatattttttttttttaagttattggtttgttgtttttgagtttagttaaatttttaaagataagattaaagtaaggaagtaaggtatatagtttttggtttatggttttttttagatataagtattgtgaatgaagattttgttttatttatatttgggattttggagtttttataaagaatatttttagtataaggatgtgatttaaagggggatttatagaataatattttaattattgtttgatttatatttgagtgtaatggataaataaatataattttagttataaaatttgaaaaatatatatttttttatttaaaaatttttgatagttttgttaggtattggagaattagaaataaatgtttttttatttttttttttttgatgaaggaaagttattaaaaatagttatatagaaataataatataattgtagattttattttaaatatagttggtatgttttttttttttttttttatttattttttattttagatagttagaggggaaagtttgttttagagatagaaagaagatatttatggggtataattttattttagttatttgatagtttgaagaagtatttaattttttgaataataatgttataagttaaagaagagaaaagataggtagtttaaagttttttaatattgtgtatattttaattttttaagttagttttgagaaagtgtttttgttttgtagaagtatttggttaagtgttgtgaagtttattggtattaaaagaaattaaaaattttggaggattagagaattaaatttggtaatataaatgaaaatattttagaatgtaaaaagtatttaatttattatttttaattatgttttattatatatagatggtattatttatagtgaatgttaattattaatatttttttaaaaatgggtattaatttgttattagttgtttgtttttgatttagtttttttttgttgaaaggttttatttaattgtattataaagggataaaagggtaaaagataataagttttttagattggtagatttgttatttataaaatggttttgggtaggttatttgaattttttgaaatttaattagatttatttaaatttaagaatgagaatataaatttatattttgaagtgttttatagaaaggtttattttaatgtttggagtatatattttaatgaatatttattttattttatttttttttatttttgaattaagtaattttgaatttaaagttgttatgattagtattgaaaagattattggattattaattgtgtgattttgggatagtaattttttgtattttagtttgtttatatgttatatatgaaggttgaagtttgattttgttttgtgattattattttaaatatttgatgaaattaaattttagtgtttggaatggtagtataataaatttattaagaataaataatttattgtaaaaatatattgatttttaaatgatgtaattgatagttatattattgtagagggttgataaataataaaagaaatgaaagatgtatatggtgagaattgaaattattttgataagttttttatttgtttattatttaaaattaatgattatgttgaatgtttataaattataaaatataaaagaaattttataaatgtgtatgtataggagtttaagttattaaaagttttaaagtataagtttaaattaaattaattaaagaagttgagaggaaaaattggtttttatttttaattattattgttttgaggttttatgtttaatataattttttaagtagaggttttagagagaagagttgtgaggatatttttatatttgtgtagaaggaaaagtttgttatttattttagtatttttagtgttatattgatgtgtattttggatttattttgtttttattgtataaatttatatttgattttaaagaaaaggaaaatttaaagttttttttttttaaggggatagaaattttttgtgttaattgtttgatttttttttttgtaaggttttattggaaattttttgtaatataatgtaggggatttttttatgtgttgatgttgtttatatagtggggtgggtttgattgaagaaaaaaaattgtatatatgtatgaaagattatggttttatttttggaaagtatgaaaggtgattgatatttttaagaagtttttgttatttaggaaaattattaaatattttatttagagatatttggaaagattgaaggaaaggaagaatgaagaaagtagaatttagatttatgtggggagagatttgtggtagaggaaaagtattttttttgaatttgataagggatttgtttgggggaattttttgtttagttttttattattagggttttttgaagttgggttttttattgggtagttttttgggagtgtagtggggaatttttatattttttttttaggtttttgaaggattttgtttttttagtgttttttttaggttggtaggagttttgagtttgatatttttttttgatgggataggtaagttttgtgggtgtgtaaatatgttgtaattaagttttttgttgattttatagttttgtgtgtttttgagaagaagtgattgtatttaattgtttattgttggtttgttttttaagagtttgggggttttttttttttaatttagaattagttgtatggggggtggggaagtgggggtggggaaggagtgggagggtagtggtttttgtgagtagagtgatgttattgagtgagtttttgaatggggagtgttgttgtttttaagttgattggtattttttgttaggaagaaatgttaagaggtgggagtgtttggggagggaggtaggtggtttttattgtaggtgtggggagttgtttttttgtttttttgtttgttttttaagtttggatttttaggagtggttgaagttgtggagtgtttttggagtttgtgaatgaatttttttttttttttttttttttttttttgttgagttttttttttggttttgatggtatagtgatataatgatgatgggtgttataatttgtatttgaatttgtaggtgagttgttttgagtttttttggggaagaattttaggtgtgtggatgtaatagttgagaatattaggtgttgtggataggagttgggattaagatttttggttagttttgtatttttttgtattttttagtattgttttgtattttttgtatttttttttgggttattatgttttttatgtgatttgtttgggtaatgttgaatttagttgtgtagtgttgtagtgaattttttttttaaattgtaataagttgttttttaaggtaattatgttttttttgttttttttttaaaaaataaaaataaaaaatttatagaaaaaaatttgtgagtttagaaaaaagaagtaattggtagaaggttttaattaaggtaaagagttgtaaggtgaagttaagaaaatgtaggtatttaaaaaatgtaggtaatttttataaaggtttttggggagaggtatatagagggattttggtgttgaaaaagatttagataaaagaaatttagggtggggtgggggtaaaatgattaatggaattgggggaagggagggaataaattgtaaagaaattatagaaaagtggtgggtttttgagttggagagaagagagggatttttggtattttgatttttttgttgttgttgtttttaatatgtttgaggtaaaagtttgaatggggattattaagatttgttatagataagtttttgaagttgttttggtgtaggttatttggttttttagtttttggtgtgtggttagtgtttggtgtttttggaaagttatttttgggtagtttttgatagtgtgatttggtgtttaagtagtttgggattttgtgtggatttgatttttttagattgtaggtagtttgggaggaggtttggttgggggaggtgtaggatttttgttgtgtttttttgatgatttggggattgttatggtttttttttggtgtttttgggtttttttgttttgtatgtggtgtgaaggggttagtagggaaggagtagaggatggggggtggggttgttggagttttgtggaggtttgggaggtttttgggtgggaaaagtttgttttgaattggtagggatgtgtaataattttttttattttgaagagtgaaatagggtttgttgtttttattttaataagtaaattggtatttagagtgtattgtagataaaggtggtttggggatttgaattaggggtttttgggttagtttttttgtttagattataggagttttttgtttttttatatattttttatttttttttagttttttgttttagttgagtaattttattggtaggtttagtggtagtggtgtgtgtgtgtgttgggagttttgggggatgtttttggttggagtgttttattgttttgtagaggtgtgggtgttgtagggtgatatttttggtgtgtgtagatttagggtatttgggttgttttggtttgtggtttgtgttattgggtgtggagtggtttgggtgttaggtagaggagagtggggtagaaaaatagtgttatagtttaaattatttgttttttaatttaattgtgttttggtaagttttgtatgtttttgggagatgttgtgggaagggggagaaatttatatggtgtttggagagttgttttgttgtgtgtatatttgtggtagagtttttttgggttgtgttttttatttttgtgtttttttttgtttttattttttttgttttttttttttttttttagtttttgttttttttttttagtttttgtgtttttttttttatagttgataaatgaatggttagtgtgaaatttttgttttttttgtgttttaaggtagtagggagggaggagtgagggaggtggtgtgtttttttggatttgtttttagtttagtttataagatttgtagaatttagatgtttaggaattgggagttttgtggtgggtgtgggtgttttttgatggagaagttttgtataggtggagaaaaataagttttttagattaagtgtgtattttttataattttgtgtttaaggatggaaggttttagtttttttttaagttatttattttgtattttataatttgtggtgtatatttaggagtttggaggattttgaaaaaaggttttggtttgtgtaaagtgtagagatgtttttttgtgagttggttggaatgtatgtggtgttttgggtttagtttgttgtttagtggatgaatgtatatggttggggtggagttaggttttggaggtttagatgtgttattttgggtgtttttaagaaagataatatatatattgtgtttttaaaatttatgattatttgaatttaatggtagggttttgttttaggatattgtaaaagaagggtttttaatttaaaatttaaatttttttaattttagggtgggtgttggatgggaaagtggagagaaggtgggtagtgggaggaaaaaagaaagggaaggaagggaagtggaaggaaagaggattgtggaggggaggaaaaggagaaaggaatggagatggggtagatggtatttaaatagttaggaatggattggaagggtttgttttggggtttgggtttgaattttgagatttgttttaggatattttttttttttttttagtggtaataaatgtgattgtagaggtgtgttgggatggaagggtgggaaagaattagataagtggaggtggtttagttttgtttaaaggggttgggtttggggtttgtttttatttgtttattttgtgttaagggaggatttgtaatgggtgttttttgtagtggttgggttagttagttgttatgtgggttggtgttttggtttttagttgagatgggtgtgattttttgggtttagagattgtagtatagttgtataggtggttggtgtagttgaggtttttatttattgaggttaatgggggtggggtggggaaggtagggtttagtttaattgagagagttgagtggttttgtttttgggatttggggttggttgtttttggagttgatttgagttttatttagatagtgttgaatatttttattaaaaggttatttaagttttattttattttattttatttttgtttgttttttgggagtggtaggaggggtattgtgtttttgttttgaggtaggggagaggttaaaatttattttaagtaaattttttgttagaaaaatgagattttatattgtattttatttgttgattttttaaatatatttaggttattttaaagtttatttttagttaattaatagattaattttgttttagattgttataaagagtttgtttggaatggtaaatattgttatttgataagattaatagaattttatgggggtaaatatggaagggttgtgagtgtaattgaggtttttgtgttttaatgaggaattttagtggggatttggtggggattggaagtttagtatttatttagggagtgattgagttggaaatttggagaagtttggtgtagatgagatggtgttttttagagttgtattttaagtttttttattttgttgtatattggaagaattggattttaaagattttttttattattttagattttgtagttaatagttatgtttttttttttttgtttgttgaaagttgtgatttaattgttttaagtattttttgataattttgttaaatttattttgaaaatatttatataaagttttaaaataggatgttgtgagtgtaatataaaaataggaaggtattaatggaagtaataattagtgttttgagatagaagtggtttttagtttgtaatttggaaatgttaagagtagtatattagggagaaggtttttaagagtttgattttttgttttgagttttgagtaaagaaagaaatatgttagaattgtattgtttgtttgtagtaatattgtaaagggttttaatggattttaatgtgattgagtaattattttttttagtattaagtttatagtttttaatttttttgtgagaagattaggtaggaagtgggatgagatttaagataattatttaggatttatgttagaatttaaagttttgatttttttggtagataaaaatagagttggttttaaattgtattttttgtttttaaaaaaatgaggtttgaaaggaatttttttagatttatataggtttatagatgtaagttttttttttttttttgtgtttgtaaattggagggagatgtttttgatattttagaatatttgtatttatatatttgtaaattttgttaggaaaggatttaaatagttaaattaaaggtgattatgattaatgttaaagatattatttattgtttttttttttgttgtattattaggtttaaatattttggagttaatgattggttatttaattgagtaatagagtttttgagagtgtaaagattaattaattttgttttttaaagtttggtaattaagttttttttttttggtgagatttaaatatttttgttgatgttatttatggataaatattggtaaatattgtatttaaaatgggatattgttttgtgatggagtagaattttttaagatatatggtttttttgaaagaaagaattaatgattgtagtaaggtatttttttattatttatgtagagaaattagttaggattgataaatatttattgttgggagttatttgttttggtttgagaaaatatgttgattgttatataggtttgtattttattagaaaatataaagtatgtattttttttgatttggaattagaaaagggggattagatatggatgttttggttaagttttattttaattagtgaatttttgttagtttttttttgtagtttagatttggtaaattatatatatataaagtttgtgtgtgtgtgtggggtgtgtgtgtgtgtgtatgtatatagggtttttaaatattgttaagtttttattattgaatgtgttagaggtggttgtattttagaggttagtataaagaatttttgtttaatgtgttagttttgttttttgaaatatatttttgggtagatttattaattataaaaggatataaatgtatatattttttatatttgtatatattttattttatttttttaaggattttaagaggtgtttatgtttataaaatgagattatatattttataataaatatatttgataaattataatttttttattattaaattattgatttgatattatttgaggtatagtggaatgagtattagatttggaattagaaagtttgagttggatttattagttgagaaaattaagtaaagatattatttttggatttttagtgttataatttattaaatgaatatgtagttataaagattaaaagagtaagtattttgaaaaattatataaaaaagggatgataatatattatgttttgggatttatattgatttaattttataattttaataataattgtattatttaagttatgtagtttttattgaatttataaaataaattagagaggggtatattgttttaaaaattgtttagttttattaattagaagatagattatagaaattgattttaatgaagttggatatttagtggaaaggaagaattatttaataaatggttttaggataattgatgggtttatgtaaaataagaattagtttttatttgattttttattttaaaagaaatataagatgaattaaatatgaaatgtagggaataattttttataaaatgataaaagaaaattatgggattaaaaaaaataagttaggaatagagaaatttgttttaagtaaaatataaaatttagtgttattttaggaaatattgataggtttgattaagtaaaaattatataaaagtaaataatatatttggaaaatatttatgatatttgagagataaaaagttaataatttttgatattttatggatttttatgaataattttgaaaagtttatatttattaaaatatgagtaaaaattatgtataggtagtggtagaaagagatatagagttttaaaattatagaaaaaattgtttagttttatttgtaattaaataaatagtaattaaaatattaatgatatgttatattatttttttattaattagaggagtaataaaaaaaaataatttttttttttttttttttttttgagatggagtttgttatttaggttggagtgtagtggtatgattttagtttattgtaatttttgttttttaggtttaagtaatttttttgtgttagtttttttagtagttgggattatgggtatttattattatgtttggttaatttttgtgtttttagtagagtggggttttattatgttggttatggtagttgattttgaatttttgattttaagtgatttatttattttagttttttaaagtgttgggattataggtatgagttattgtgtttggtaaaaatgaaattaaaaagtttgatgtaagtttgtgttggttaggttgtggagaaattgggttttttatatattgttgtatgaaagtaaataggtttttttattttaaaaaataatttggtaattatttttttttgattttttattaaaagtttttaaaagatgtatatattttttgatttagtaattttattttttgatattattatatggatggatattggtattaatattatttaagataaatggataaggatgttttttgtagtattgtttttaagagtaaatatttggaaatagtgtaataggtttattatagggaattatttaaataaaagttgttgtatttatttaatggaaaattatgtagttgttaaaaataatatggaaaaattgtatttgttgatttggaatattttttaaaatatattgtattttaagtgaaaaaattgatagataaaattgagtatatattatatatttaattatgtaaaatgggtgtatatttatttttttaataaatatttattgagtgttttaggtattgtggatataggagtgaataaaatattaaagattgttttgttggaatttttattatggtaggtagagaaaggtaatttttaattatatatgtaaaatggtgatatgtgttaggatgaaaatagagtatgggaaagggaatagagtatagtatgttttaggtagagtaatgagaaaggagtttattaggtagagaatagaggagtgttaaggggtgataatgtgaaaaagtttagttaagtttaggtttaggaatttatatgatgttattatttgtatgaagtaaatttatgaaattttgtatttaaattatgtgatttttttttgttgtataatgattttttttgtgagaaagaattagtgagtaatatgatatgtgatgtttattatatttattttgtagttgaagtattttagaaagttggttgtttagggtatttaattagtagaatggtggataaaattattgtgtttttgtttttaagttattttttgttagttgagtttttttaaaattaagggagaatattaaatatttatttaatagaattttggtttttttttggaggttgtttatttttggtgtgttttttattttttttgtagatattttttatggataggagttttattgattttgttttttatgttttttaggtaattaaatagttttagtattttgtatttggattgtttaatgatttttttttttttttattgattttattggagtagaaggttaaatataggtatttatttttatattttttaggtttttttatgtagatagagttgttattattagtagatggtgtttataagagagatatggaaaagtggaagaatggaaatagggatttggagtggtgttaaaaataaagaaagaggtttttgaaagttttttatttaatatgattaaatatagaagataaaagatgtaatttaatgattaaggatagggatatagttttgagaaaattatagaagtggaatgaatgttttggattttaaagaagagggaatggaaatgtagttttgaggtagttaaagttaataaagttttttgatatatttattgtagaaataaatgattattttttaatttaaggtttgtaaatttaggtgattataggggtgaggtatggagtggaaatgggtaagagattaagtgggggtagtaatggttttgagtatatagatttaaggggagagattgttgtttggttaatgtttatgattagttagttgaaatatagatttagtgttgttagattttttgattttttgaaagaagttagagattttatatttagtgtaaatagtttaatttttaaattgagtaatttatttaaatatatttatgtaatttatttaaatgtatttagagtatgtttgattttttttttgtatttttatttagttttaggggtaattttaaggaaagtgatgtgtatatttgttgtatttatgtagatggaggattatttttttttttttaataaaagatatttttataaggattgagtgtggtataaagagtttgatttttagtatttaaattgagtaggaaatttaaatatagaagatttttttttgggttatatttttggtttttttaaatgagatttgattttttagatattgataaatattatattattgggttatggtaaatttttaagtggattgatttaaaagtgtttaaaagtattttaggtgttaaggaattgttggtatggagttttaaaggtgtttttgtataagaaatagaggtgttgattatgtatttgatttataaatattttttaaggatatattttgaatttggtaatgaagaaatattgtgggaattattaagttgaataaagtattagttttgttttttagaagtttattgttttatagaggagattagatatgtttatagataatttgaagtatatagtaataaattataggatgatttattttaagtataaagtgtatattgttattatagtggtaatttaggttataatttttaaatgtaagagttttaaatattattttttttatttttagtgatatgaaattatgttagaatatttgtagaaagtttgaattagtaattttaataataaatattgagtattgatatattgtatattattgagatttattttatatatattattttattaatttttatgattattttggtaagtattaatttttataattaagtagtgatagaaaatgaggtttagagagatatagtattttatttaaagttatagaatataagtagagaatgtagaatttgtattttgggttatttgatagtggagtttagatttttaaaattaggtttataaagattttttggaaaaaaagaaaaataaaaaatagagaataaatttttttgaagaaaagtaggaaattattatttataagtataattaaagagagatttttaattttttttttttttttttttttgagatggagttttgttttgttgtttaggtgtaattttagtttattgtaatttttattttttgggtttatgttataaagaaagtttttatttgattggtttgatttgattgtttattagaatataggttttttagtagggttaataagttataatagttttagtgatataagataaatataaattaataataaggttaatttagaattattaatatatgttttttattgtgaattattagttggtttatagatggaaaatataagatatataatgtattagtttaaaaaatgttttttagagagtgtttagaattatagaatttaaaaattttgttttgaaaaggtttaatttttattttaaaatatataaagaaattaaatgtaaaaaaattaagagaaaaggttttaattaattaaatgttgtataattttaagttttatttatgtttaagattagttttgtaatttatgattaattttagtattagtttgtttttaatttaggtttgttaaataatatagaattttttttttaatgaagttttttagggttttagttgaaaaatatatattagttaggatgtttttaattgtaaggaataaaaagttatgattttattgggtttaaataataatgatatttataattttatataaaatgaagtttaaaggtatggtttattttaggtttaatttttaaggatttatgttttgtttttgttgatttttttttagttttatttttagaggtattttatttatttatggatgtaaaatttttataatagttttagtagaaagattttagtatgataatgtttagggaagaaaattgattatttttttttttgttttttttttaggatgaatttattttttttagggattttttattggaggaagagatttttttatattttattggttaaaattatattatatattgttttaaatttaattattggaaaagggaatggtatttttataattgatttaggatattaggattattttttgggttggggtttgatttaggattttttaaagtatgtgattgagggtaggtattagaatggaattagagttgtgttagaaaggagaaatgtatggttattatagaatagttttaaatgttattgaggagggtataattgtaaaaattaaataattttttgttatttttttgaagttggtattttgatttttagatggttttttaatataggttttttttttttttattattatagttgttttgaaatttgagttggaagggaatattttgagatttagattgttaaatgttttttttaaagttatgtaataaattaaatggtaaagttagggtagttttttgatttagtatagggtatttttttttattttttatttttgagattttagaattgttggtattgttttaaaatttatggtaagaattggttatttttgtaattaatatttttttataatatatttgttttgtttgtttagttagttagaaattatatggagtttgtgttttaaaaagtttgttgaagtttttattttttgttttggtattatgtgtatgaattattaattggtttttttttattttatatttgatgaagatgttttttttttaatatttttttttattgttttttatttttttttgttttatttatgattagttgtttgtttttaaatagattttgtggttatttatttttttttgtgttagtttttatttattagttatttgaattgtggtttttattgttttttatatagtttatttatttgtggttgttatatatatttatattgttatatgtttttaaattgtattttggaatgattttggtaatggttgtattggatgagatttaaattaataattaaagtattgagatagtttttgttattataagtttatttttgtttttatagtttaagaggagttattttttttatttttattatttaatgtttaatattatttttattatatataatgtataaaaagtatgtgatttatgatttattttaaatttgaatgtttgtgatttattttgtgtttttttttatttttagg

SEQ ID NO: 301 - DNA, 16579 bp, Artificial Sequence
  chemically treated genomic DNA (Homo sapiens)
tttagaaatgaagaaaaatataaagtaaattataagtatttaggtttaaagtgggttataaattatatgttttttgtgtattgtatgtaataagggtagtattaagtattaagtaataagagtagaagaagtagttttttttggattataaaaataggagtaaatttgtaatagtagaagttattttaatgttttaattattagtttgaattttatttaatgtagttattattaaaattattttagaatatagtttgggaatatataataatgtggatgtgtgtgataattataagtgagtaggttgtatgaagaataatagagattatagtttaagtaattagtggataggagttggtataaaaagaaatgggtgattataaagtttatttagaaatagatagttgattataaatagagtaagagaagatggggagtaatagagaaagatgttgaaagaaaggtatttttattaagtgtaaggtgagaaggaattaattggtggtttatgtatataatattaaaatagagaataaggattttggtaggttttttaaagtatagattttatgtagtttttagttggttaagtaaataaaataaatgtattataaggaggtgttaattataaaagtgattagtttttgttatgaattttaaagtagtattaatagttttaaagttttaagagtaaagaatgaaagaaaatattttgtattgagttaagaaattgttttggttttgttatttaatttattgtatgattttggaaaagatatttaataatttgggttttagaatgtttttttttagtttaaattttaaggtagttataatgatgaggaggagaagaatttgtgttggggaattatttagaaattaaagtgttaattttaaaagaatggtaaaagattatttggtttttatagttgtgttttttttggtagtatttagaattattttataatagttatgtgttttttttttttaatataattttggttttattttagtgtttatttttagttatatattttggagaattttgggttaaattttagtttaagggatgattttgatattttaagttaattatagaggtattatttttttttttaatgattggatttggaatagtatataatatagttttggttagtgagatgtgaggggatttttttttttagtgaagggtttttgggaaagatagatttattttgagaagagaataaaggaagaggtggttagtttttttttttggatattattatgttggaatttttttgttggaattgttgtagggattttgtatttatgagtaagtgagatatttttggaaatgaagttgagaaagaattagtaaaggtaaggtgtaagtttttaaggattagatttagagtggattatgtttttgaattttattttatatgagattataaatgttattattgtttaaatttaataaaattgtgattttttgttttttatagttgaaagtattttaattggtatatattttttagttgggattttgaaaaattttattggaaaagaaattttatattatttagtaaatttagattgaaaataagttaatgttgaaattagttataaattataaaattgattttgaatataaatagggtttggagttgtatagtatttaattaattaagatttttttttttaatttttttgtatttgatttttttatatattttgaaataagaattagatttttttaaaataaaatttttaaattttataattttagatattttttgaagagtattttttaagttaatatattatatattttatattttttatttatagattaattgataatttataatgaaaaatatatgttgataattttaaattaattttattattagtttgtatttattttatattattagaattgttatgatttgttaattttattggaaagtttatgttttagtagataattaggttggattaattaaatagaaattttttttatggtatgaatttgggaggtggaggttgtagtgagttgagattgtgtttgggtgatagagtgagattttgttttaaaaaaaaaaaaaaaaaagaaattaaagatttttttttaattatatttataaataataattttttatttttttttaggaaaatttgttttttattttttatttttttttttttttaggaaatttttataagtttaattttaaaagtttgggttttattgttaaatagtttagaatgtaagttttgtattttttatttatattttgtgattttgggtaaaatattatatttttttaaattttattttttgttattatttagttgtgaaaattagtatttattgaagtgattataggaattgataaaataatgtatataaaataaattttagtgatatataatatattagtatttaatatttattattaaaattattaatttagattttttgtagatgttttaatatagttttatattattaagagtaaaaagaatagtatttggggtttttatatttgaaaattataatttaggttattattatagtagtaatatatattttatgtttggaataaattattttataatttattgttatgtattttaaattatttgtaaatatgtttaattttttttgtagaatagtaggtttttggaaggtagagttagtattttatttaatttaataatttttataatatttttttattgttaggtttagggtatatttttgaggaatgtttgtagattaaatatatgattaatgtttttattttttatgtagaaatatttttgaaattttgtgttaataattttttaatatttgaaatatttttgaatatttttgaattagtttatttgaagatttattatgatttaataatatgatgtttgttaatatttagagagttaaattttatttaaaaaaattaaaggtgtgatttaggaaaggattttttgtatttgagttttttatttaatttaaatattaaaaattgaattttttgtgttatatttaatttttataaaagtgttttttgttggggagaggagaatggttttttatttatataggtataataagtatatgtattattttttttaagattatttttaagattaggtaagaatataaggaggagattagatatgttttaaatatatttgaataagttgtataaatatgtttgaataagttatttaatttaaaaattagattgtttatattaaatataaaatttttaattttttttaaaaaattagaaggtttagtaatattaagtttatattttagttggttgattatgagtattaattaagtagtagtttttttttttaagtttgtgtgtttaaggttattattgtttttatttagttttttatttatttttattttatgttttgtttttgtagttatttaagtttgtaaattttgaattaaaagatgattatttatttttatagtaaatatattagagggttttattgattttagttgttttagaattgtatttttatttttttttttttggagtttaagatgtttattttatttttgtaatttttttaaggttatgtttttatttttggttattaagttatattttttgttttttatgtttgattatattaaatggaaagtttttagaagtttttttttttgtttttagtattattttaaatttttatttttatttttttatttttttatgttttttttataagtattgtttattagtgataataattttgtttgtatggaaagatttgagagatatgagagtgaatgtttatatttagttttttattttagtgaagttaatgagaagggaagaaagttattgaataatttaggtatagggtattgagattgtttaattgtttgggagatataaaagataaggttaatggaatttttatttatgagaaatgtttgtagggaggataagggatatattagggatgggtagtttttgagagaaagttaagattttattaaatagatatttagtatttttttttgattttggggaagtttagttgataaggggtgatttaaggatagagatatggtggttttgtttattattttgttaattaggtattttagataattaattttttaggatattttagttataaagtggatgtaatgagtattatatattatattgtttattggtttttttttatagaaagaattattgtatagtagagagaaattatgtgatttaggtgtgaaattttatgaatttattttatataagtaatagtattatgtgaatttttgaatttggatttggttaagtttttttatattgttgttttttagtatttttttgttttttgtttggtgaattttttttttattattttatttaagatatattgtattttatttttttttttatgttttatttttattttagtatatattattattttgtatatgtgattgggaattgtttttttttatttattatagtaaaagttttaatagagtagtttttgatgttttgtttatttttgtatttataatgtttagaatatttagtaaatatttgttaaaagaatgaatatatatttattttatataattagatgtataatatatatttagttttatttattaatttttttatttagaatataatatattttggagaatgttttaaattagtaaatataatttttttatgttatttttgatagttgtatagttttttattaggtggatatagtaatttttatttaaatggttttttatgatgagtttgttatattgtttttagatatttgtttttagaagtaatgttgtaaagaatatttttgtttatttgttttgggtgatattggtattaatatttatttatataataatgttgagaagtggaattgttgaattaaagagtatatatattttttaaaaatttttgataaagaattaaaaaaaagtgattgttaaattattttttgaagtagaggaatttatttatttttatataatagtatatgagagatttagtttttttataatttggttaatataaatttgtattaaattttttaattttatttttgttaggtatagtggtttatgtttgtaattttagtattttgggaggttgaggtgggtgaattatttgaggttaggagtttaagattaattgttatggttaatatggtgaaattttattttattaaaaatatgaaaattagttaagtatggtggtgggtgtttataattttagttattagggaggttgatataggagaattgtttgaatttggaaggtggaggttgtagtgagttgagattgtgttattgtattttaatttgagtaatagattttattttaaaaaaaaaaaaaaagaaaaaaattatttttttttgttatttttttgattggtgaaaaaatggtgtagtatattattggtgttttaattattatttatttaattatagatgaggttgagtgattttttttataattttaaaattttatgtttttttttgttattatttgtatataatttttgtttatattttgatagatgtggattttttaaagttatttataaaagtttatggaatattaagagttattagttttttgttttttaaatgttgtagatgttttttaaatatattatttgtttttgtgtaatttttatttagttagatttattagtattttttagaatggtattgggttttatgttttgtttagaataggtttttttatttttaatttattttttttaattttatgatttttttttattattttgtaaaaagttattttttatattttatatttgatttattttatattttttttaggatgagaaattaggtagagattgatttttattttgtatggatttattaattgttttgaaattatttattgaataattttttttttttattgaatgtttaattttattggagttaatttttgtaatttgttttttgattaatgaaattaaataatttttaaaataatatgtttttttttgatttattttatagatttagtagaaattatatggtttgggtaatgtagttattattaaaattatagaattagattaatatgaattttaagatataatatattattattttttttttgtatagttttttaaagtatttatttttttgatttttataattgtatatttatttaatagattatgatattaaaggtttaaaagtaatatttttgtttggtttttttagttagtgagtttaatttaaattttttgattttaagtttagtgtttattttattatattttaagtaatattaaattaataatttaataataaaaagattataatttattaaatatgtttattgtaaaatatgtaattttattttatagatataaatattttttaaaatttttagaagaatgaggtaggatgtatatagatgtggaaagtatatatatttgtatttttttatagttggtaaatttatttagaggtgtgttttaggaaatagaattgatatattaaataaagattttttgtattgatttttgaaatataattatttttaatatatttaatggtaagaatttagtagtgtttaaaaattttgtatatatatatatatatatgtattttatatatatatatagattttatatatatgtaatttattaagtttaggttataagaggaaattggtaaaaatttattaattgaaatggagtttggttaagatatttatatttaattttttttttttgattttaaattagggagagtatatgttttgtgttttttggtaaaatatagatttatgtaataattagtatatttttttagattagagtaagtaatttttaataatgagtgtttgttagttttaattggtttttttatgtgggtggtgaaaaaatattttattatagttattaatttttttttttaaaagaattatgtgttttgagaagttttgttttattatagggtaatattttattttaaatatagtgtttattgatgtttgtttatgaatgatgttaataaaaatgtttaaattttattaggaaaggagggtttagttgttagattttgggagatagagttagttgatttttgtgtttttaaaggttttgttatttaattaagtgattaattattaattttaaagtatttaagtttaataatataataaaagagagaataatgggtagtatttttaatattaattatggttatttttggtttagttgtttaggtttttttttagtagaatttataagtgtatagatataggtattttggaatattaaaggtatttttttttagtttgtaaatatagggaaaaagaagaaatttatatttgtaaatttatgtaaatttagggggattttttttaaattttgtttttttgaaagtaggaaatataatttaaaattaattttgtttttatttattaaaagaattaaaattttgaattttgatataaattttaaatgattgttttgaattttattttgttttttatttaatttttttataagaagattaaggattgtggatttggtgttggaggaagtaattgtttaattatattggaatttattggaattttttataatattattgtgggtagataatataattttaatatatttttttttttatttagagtttagaataagaagttagatttttggagattttttttttgatgtattgtttttaatatttttaagttataaattgggaattgtttttattttagaatattaattgttgtttttattggtatttttttatttttatattatatttataatattttattttaggattttatgtgaatatttttaggatgggtttggtgaaattgttaagaagtgtttaaaataattaggttatagtttttagtagataaaaagaaaaagatgtggttgttagttatagaatttgaggtgatggaaaagatttttaaaatttagtttttttaatatgtagtaaaatgggaggatttaaaatgtagttttaagaagtattgttttgtttgtattaagtttttttaggtttttagtttagttattttttaaataggtgttgagtttttagtttttgttaggtttttgttaaggttttttattgaggtataggaattttagttatatttgtagtttttttatgtttgtttttatgaaattttattagttttgttgaatggtagtatttgttattttaggtgaattttttatgatagtttggaatgaaattaatttgttaattgattaagaatgggttttagagtgatttgaatgtatttaaaaagttaataaatggaatatggtataaagttttatttttttgataaaaagtttgtttggagtaaattttaattttttttttgttttaaaataaaagtatgatgttttttttattatttttaagaagtaagtaaaaataaaataaaataaaataaaatttaaatagttttttaataagagtgtttagtgttgtttggatggaatttgggttagttttagaagtagttggttttgaattttgggggtgaggttatttggtttttttggttaagttgggttttgttttttttgttttgtttttattggttttggtgggtgggggttttggttgtgttggttgtttgtgtggttgtattgtagtttttgagtttaggaagttatatttgttttggttgggagttgaagtgttaatttatgtggtggttggttaatttagttgttgtggggagtgtttgttgtgggtttttttttggtgtgaggtgagtgagtgggggtgggttttagatttagtttttttgggtggggttggattatttttgtttgtttagtttttttttatttttttattttggtatgtttttgtagttatatttgttgttgttgggaaagggaaaagagtattttaaaatgagttttgaaatttagatttaaattttgaaatgaatttttttggtttgtttttggttgtttgaatgttatttgttttatttttgtttttttttttttttttttttttttatggttttttttttttttatttttttttttttttttttttttttttttttattgtttgttttttttttatttttttgtttgatgtttgttttgaagttgaggaagtttaagttttggattaggagttttttttttgtaatattttggggtggggttttattgttgggtttaagtggttatgggttttgagagtatggtatgtgtattattttttttaaagatgtttagggtggtgtgtttagatttttgaaatttggttttattttggttatgtgtgtttgtttattaagtggtgaattggatttagggtgttgtgtgtgttttagttgatttgtgagaaggtatttttgtattttgtatagattaagatttttttttagggttttttaaatttttagatgtatgttgtagattgtggagtgtaaaatgaatgatttaagggaaaattagggttttttatttttgaatataaggttgtgaaagatgtatgtttggtttggggggtttgtttttttttgtttgtgtgggatttttttattagggggtgtttatatttgttgtaaaatttttaatttttagatatttaggttttgtaagttttgtgagttgaattgggggtagatttgaaggagtgtattgttttttttgtttttttttttttgttgttttggagtatgggaaaggtagggattttatattagttatttatttgttagttgtgggggaggggatgtagaagttagagagagagaatagaggttgggagaggggaagggaggtagagaagatggagatagagggagatataaagatgaggaatgtgatttagagagattttgttgtgggtgtgtgtgtggtaggataattttttaggtgttgtgtagatttttttttttttttgtagtattttttagggatatgtaggatttgttgagatgtagttggattggagagtaaatagtttaggttatgatattatttttttattttgtttttttttgtttaatatttagattgttttatgtttagtgatatagattgtgggttagaataatttggatgttttaggtttgtatgtattagggatgttgttttatagtgtttatgtttttgtaggatggtggggtgttttagttgaggatgttttttggggtttttggtatatgtgtgtgttgttgttgttagatttgttagtaaagttgtttaattagagtggagaattaggagagggtggggaatatgtaaggaaatggaggatttttgtagtttgggtgagaggattgatttagaggtttttgatttgggtttttgagttatttttgtttgtagtgtgttttgggtgttggtttgtttgttgagatgggagtgatagattttattttattttttagggtgagaaaaattgttgtatatttttgttgatttagaataggttttttttgtttaggggttttttagatttttgtggggttttaataattttattttttattttttgttttttttttgttggtttttttgtattgtgtgtaggataaaagaatttaggggtgttgggagagaattgtgatagtttttaagttgttaaagagatatggtggggattttgtattttttttggttggatttttttttagattgtttgtggtttgaaggggttaggtttgtgtaaggttttaggttgtttgggtgttgggttgtattgttaggagttgtttgggagtggttttttaggaatattaggtattgattatatattaggggttgggaaattaggtggtttgtattaaggtggttttggggatttgtttgtggtaagttttggtagtttttatttaaatttttgttttgagtgtgttaagaataataataataaaaaaattaaagtgttaaaggttttttttttttttttagtttaagaatttattatttttttatgatttttttataatttattttttttttttttttaattttgttagttattttatttttattttattttgggttttttttgtttgaattttttttaatattaaggtttttttgtatgtttttttttaaaagtttttatgaaagttatttgtattttttaagtgtttatatttttttaattttgttttatagttttttgttttaattaaagttttttattaattgttttttttttttaagtttgtgggtttttttttataagttttttgtttttgttttttaaggggggaataaaagaaatgtgattattttggaaggtggtttattgtagtttggggggaaaatttattgtagtgttgtgtgattgggtttggtgttgtttaggtgggttatataggaagtgtggtggtttggggaaggatgtggagggtgtgggatggtgttggaagatgtgggaggatgtggggttggttgaagattttggttttagtttttgtttataatatttaatgtttttggttgttgtgtttgtatgtttggagtttttttttagaaaggtttggggtagtttgtttgtaagtttaaatgtgggttgtgatatttattattattatattattgtattgttagagttgaggaggagatttagtgagaagaaggaggagggagaggaggagggtttatttataggttttaaaagtgttttgtagttttagttatttttaagagtttaggtttggaaagtaggtggaggggtggaaaggtagttttttgtgtttgtggtagggattgtttgtttttttttttaggtatttttattttttggtgtttttttttgataagaagtattaattggtttggggatagtagtgttttttatttagggatttatttagtaatattgttttgtttgtggaaattattgtttttttattttttttttatttttatttttttgttttttgtgtagttagttttgggttaggggaaaggagtttttaggtttttagggggtaggttagtaatagataattgagtatgattatttttttttgggagtatataaaattgtaaaattagtaaagaatttggttatagtgtgtttatgtgtttatagagtttgtttgttttattaaagggaagtgttaggtttaaggtttttgttaatttgaaagagatattgagaaaatgagattttttggggatttagagggaaagtgtaagaattttttattgtatttttagggaattgtttaatggggagtttggttttaaaagattttggtaataaaaggttggataggaaatttttttaggtaaattttttgttggatttaaagagaatattttttttttgttataaatttttttttatataagtttagattttgttttttttgtttttttttttttttagtttttttaagtatttttgagtagaatatttgataatttttttgagtaatagggattttttggaagtattaattattttttatgttttttggaaataagattataattttttatgtgtatatgtgattttttttttttagttaggtttattttattgtgtaaatagtattaatatatggaagagttttttgtattgtgttataaaagatttttaataggattttatagagaaaagggttaaatagttgatataaaggatttttgtttttttagaaaagagggattttggattttttttttttttgaagttaagtatgagtttatataataggaataaaataaatttaaggtgtatattagtataatattagggatattagaatggatggtaaatttttttttttatataaatatgaaagtatttttataatttttttttttgaagtttttatttagaaaattatattaaatataggattttaaaatagtagtgattaaagatgaaagttaatttttttttttaatttttttgattagtttggtttaaatttatgttttaaaatttttagtaatttagatttttgtatatgtgtatttataagattttttttatattttgtaatttgtaggtatttagtatggttattgattttaagtgataaataggtagaagatttgttaggataattttagtttttattatgtgtattttttattttttttgttatttattagttttttgtagtaatataattgttagttatattatttggaaattaatgtgtttttgtagtgaattatttatttttagtaaatttattgtattattattttaaatattgaaatttgattttattagatgtttagaatgatagttatagagtagaattagattttaatttttatgtataatatgtaaataaattaaggtgtagaaagttattgttttaaagttatataattaatagtttagtggtttttttagtgttaattatagtaattttagatttaagattgtttgatttaggaatggagagaaataaaataaaatgaatgtttattgaaatatatattttagatattaagatagatttttttgtgaaatattttaagatgtggatttgtatttttatttttaaatttgagtaaatttagttgagttttaaagagtttaagtaatttgtttaaggttattttgtaagtgatagatttgttagtttgaaaagtttattattttttatttttttgtttttttatgatatagttaagtaaaattttttaataaaggagaattagattagaaataagtaattaatagtagattaatgtttatttttagggaaatgttaatagttaatatttattataaataatgttatttgtatataatggaatatgattgaaagtgatgggttagatattttttatattttgagatgtttttatttatgttgttaaatttgattttttaattttttaaaatttttagttttttttaatgttaatagattttataatatttgattaaatatttttataggataaaggtatttttttagggttgatttaaggaattagaatatgtataatgttgaaaagttttaaattgtttgtttttttttttttttgatttgtaatattattatttagaaaattaaatatttttttaggttattagataattaaaatgaaattatattttatggatattttttttttatttttagggtagatttttttttttagttgtttaaaatggagaatggataaaaaagaaaaaggaaaatatattagttatatttagaatagagtttatagttgtattattatttttatgtaattgtttttaatgatttttttttattaagagaaagaaaatgagagagtatttatttttgattttttaatgtttgataaaattattagaagtttttgaatgggaaaatatatattttttaggttttataattaaaattgtatttatttgtttattatatttaagtatgaattaaatagtaattaaaatattattttgtgagtttttttttaaattatatttttgtattggggatattttttgtgaaaattttaagattttaggtataaataaagtaagatttttatttataatgtttgtgtttaaaagaaattataagttagaagttatgtgttttgtttttttgttttgattttgtttttgggaatttggttgagtttaggggtagtaagttaatgatttggagaggaaaggtgtagatggtagatgtgtttttagggaattttattatttttatttaaatttttttttgaggttttttaggattatattttagatttttttttttttattgattaggtgaagtgtttttagatatggtattatttattgttgttttagggatgataagattttagttttatttaaatttagaaagagtttagttttaattttttgatttgattggttttaggtataattaagtaaattatttttattggatgatatagtaatgttatagattaaaaatgtatttttaatttttaaagattttggaaaaaggaagtttattttttaagattgtgttataattttttttttaaataaaatattgtaaattagggatagatattttatttagtattttgaattttttttggttttttaggaaaggtagaaatataaggtttttattgttttttttttatttttaaaaaagaaattttgtaaaaggtaaagtgatggtggtaattttattgtgttttaatttgaagtatataaattgttttgataaattaaatatagataaatttttttagaaagttataaaatattagattttttttagatattagatattgagtttttgttttttaatttttaaattaaaatgttatagtaaaatatttgttttaataaattttttttttttttgtgttgtaaatgttttgtttatggttgagtagatttttttagaatttaattgaaagattatttatattatgatagaattatgtaagttaaagttaagttttaatatggagtgatgggagaggttgggttgttgagaggagatgattttattagtgagaagagaggttttttgagttggtttttaaggtagttaaatggtttagtatatttgtatttattttgggaggttgtttggagtagagtattaaaaatgttattttttttataaagaaaaagatgaaggtataaagaatatagtttaattaaattgaattaaagattgtattatttttattttttttttagttatttttttaaagttttttttttttttttttatagtttgaaaaatataggttatttttataaagtatttgtttgattgaagtaagataaattgaagagtttggtttttgaatataaggaagtggtagagattttagaattaatgaggtagggtggaatataatgtagaaggttttttaagaggtaaaatttttgtagttgttgtttatttttagtgattatttgtttttatttatttaattagattatagtgggattgagataaggagtataatgaaagttgttgtattgatggtgtaaaaagatatatggtattattaatgtttttgtggtgagtaaaggtagaatgtaagatagaaaataaggaaatttttgtgttgtaagaaaagtgtttagtatgggtattaattggtatgtagaagtagtaagtatatattttatttttattttattgataaaaagaattgtaggattaatgtttgtttttattaaaatatgagaaattatattttaattttataaattaaaggttaaatatttgttgtaataattttaaaaaaaagagaagatttgtaagatttagtaaatatttattataaatagattgtttttaattttttatatttttttttaatttaataaaagtttattgagtagtttttatgtgtattgttttagatagtaggtattatttaaaaaagtaataattattttttatttttaaggagtttataatgtttttagaaagaaattaatttattggagtagttaaagttataattgatttataaaatgattagtgaatttagaggaaaattatatataaatatttttgtttttattggttggtttagttagatattattttaaaaaata

SEQ ID NO: 302 - DNA, 6090 bp, Artificial Sequence
  chemically treated genomic DNA (Homo sapiens)
tagagatggaatgtttaaattaggataatttagggaggtgtgggagaggtgtagggggattataagggatggagtaggaatttaaggtagtaatagtagagttggtattaattttaggtttaaaaagataaaggagagagagtggttattaaaatttagaaagagaaaatttggtaaaagatgggatttggtgaggagtagtaatttgtgtttggttgtggattgtggtaattttgtagggaggagagtagaggaatgattattttggttttatttttttttttttttttttattttatgttaggtgttttattggttaaatttattagtaattagaggataaggaatgtattaaaataattttatggtttagagagtagattagatgtagagtgataaatggattatatttagtataattgtaggtttatttgttgatttgttttttttattagattgagttatttgaggatagagaatgttttttttatatttgtatttttaatatttggtggatattagatatttaagaaatgtttatggatgggattagagaagatggtaaattgggtattagatggaggtttgtgttttttgagtttgttgtatgttttttggtgaatttaaggtaaaatgagaaatagaatgagttttgtatttttgtttggtaaaagaaaatatgatttggtgagaagaaatgaatatttttagtatttagtgttgggaggaattggaattagttatgtgattgtttttattagaggtttttaattgtgtaatggatagaatttttaatggtgaaattataatgtagaaatatttttttttttttttttttttttttttttgagatggagttttgttttgttatttaggttggagtgtagtggtattattttggtttattgtaagttttgttttttgggtttattttatttttttgttttagttttttaagtagttgggattataggtatttgttattatatttggttaattttttgtatttttagtagaaatggggttttattgtgttagttaggatgtttttgattttttgattttgtgatttgtttgttttggttttttaaagtgggaaatatttttaaaaatattagtttttgataaaattaaagttatgttataaaaaagtaattaaaaggtggaaatgagataatatggtttattttgagttgagaatattttgttagaaaatgattgttttagattttaaatttgattttttatataaatttttagtgtaattttttttgtattatttttttttttattagttaaaagatggaaaggataaattgaggaatttatgttggaggagtatggatttattagatggtagaaatttgggtttttgaatgattattgtggagttgatttttgtttatgttttgtaaatttttgtgttgagagtaagtaatatatttttaatgtgttaaatttttgggatttgttgggttttatagtaatggttattttattttaatatgattgtaaaataatgttttaaaatttatagttgggtttgtttaaaatattattgttattattattataatttatagtttatattataattatttttatagaagttttttttaattggtattttataatttgtggttttttatattgttgttttttatgtgtgagatgtttttttgagttttttttgttagggatatgatagaaaataaaatatttaatattttggtgtattttataatgtataaagttttgttttatgtattatttttttagatttttttaataaatttaaggaatatgtaagggtttataattatttttattttataggtgatgaaattgagatgtttatatgtaaagtggaaataattatttatttatttatttatttattaaataaaaattttgttaatttatttaaagattaattgagagaattattttatttgtttggaatttggtatgtgttaagagaaaagtttttttaatttttttttttaagaagataatttattgttatataataaattattttgaaataatgatttaaaatattaaaagttattgattttgtttatagaatttgaattggaagatataaataattgggagtgagggtggggttggatagttggtttttttgggtattttttgttttttttgtggttttgttatatgtttttatatggtagttttagggtaattatgatagttgaaggttttagagtgggtggagggggagagggagggagggaaagagagagagagagagagagagagaaagagaagtaagtaggtagaagttttaatgttttatgatttaattttggaaataaattatattgtgttattgttattatttttttttagaagtaagtagatagggttggtgaatatttattgagaggggaattagattttattttttgattgggggagtgttaaagaatttgtgaatatgtttttaaatgattatattttttttttttaaaatgtttgtttaaattggtgtatataaaaagtttgggggttagtgatttatttaaggttattaagttgttaaatggttttattaatattagatttaattttgtgattttaaattttatgtttttttttattattttagataatttttggtgaatattattgtttattagggtagttaagatattttagttgttaaatagatttagtttttttaattgttttggataatatattttttattttgtagaaaataaatattatttatatggtagttatttataaatattttttaagtttattttaaatatttgtgttttaaatttttttttttaatagatgtatttatttgtatttttttagatgaattattttttttttgttgttgttgttatttttgattgtattttttattttttaagatttttttgtattattaagtttattgtttaagttaatattattttttaatttggggatttttttttgatttttgtgtgttttttttgtgggttattaatgtaatgttatttaagattaggatttggttgggtgtagtggtttatgtttgtaattttagtattgtgggaggttgagttgggaggattatttgaggttaggagtttaagattagtttgattaatatggtgaaattatgtttttattaaaaatataaaattagttgggtatagttatatgtttgtaattttagttattgggtagtttgaggtaggagaattgtttgaatttgggaggtggaggtggagtttgtagtgagttaagattttataattgtattttagtttgggttataagagtgaaaatttgttttaaaaaaaaaaaaaagattaggatttgatataaggtttgaggggtatttttttgttttgttttgttttgtttttaagaggttaaaatttttatagttgaaaatttttgttgaattatagagatttgaattaatttagtttagaaagtttggggatttgaataatggtatggattggaaatttttttatttgttagtttttattattttaggtagtaaaatagatttttttttaggagttttttattgtttggggttttttagtagtgggatgtggggaattaatttttttttgtttttatttaaatattaggtgggagtaaggggtgggaagtagagaaagtggatagaggtttttagtggatatgggatttttgtgtagattagtatagtttttagaaattttatgtaagtaatataggtattgttatattttttagtggttattttttaaaaagtaaataggtgaggttgggtgtggttgttatgtttgtaattttagtattttgggaggtttaggtgggtggattatgaggttaagagatggagattattttggttgatatggtgaaattttgtttttattaaaaatataaaaattagttgggtatggtgatgtgtgattgtagttttagttattggggaggttgaggtaggagaattatttgaattttggaggtggaggttgttatgttttattatattttagtttggtgatagagtgagattttgttttaaaaaaaagaaagtaaataggtgaaattaattttaataatatattttgtttaatttaatgtatttaaaatattattatttgaaagtgtaatgaatataaaaatatttatgagatattttttatttttatatttatattgttttggattttaatgtgtattttatatttatagtataattaatttgggattagttatattttagtttaataatagttaatagtatatgggatagtgtaaataaattttgtgtttttgttgtttttttgggttttggagattttaattttttttttagattgtaaatttttttgtttttaagttttggttttaatattagtttggtagaggaatttagtttaatgaggtatgttttttttttgttattttttattttattaatttgttttgtggtaaatgtaggattgattttttaaaattattttattaattagtttatatatttattatttatttgttttattagaatgtaggtttttggaaggtagggatttaaaaaaatttgttttgttttatgtgatttttttatattaagtattgtgtttggtataagttgggattttagtatatattttgggatggaagaattgtgtttttttagaatttagttagagggtagtttagtaatgtgttataggtggggtgtttgtgttttgggtggatgtattggttttttggttggtgtgggtgtggggtgagtgggtgtgtgtggggtgtgtgtggtagagtgtgttagtgagtttggagtgtggagttgggaggagtagtgagtgttgtgtagaatttgtagtgttggtttggtagggtagtttggaggtgggtgggttgtgttgttagtttgtttgtagggtttttattggttgtttgttggttgttttttgtttaaaaggtggtaaggagttgagaggttgttttggagtgtgaggaggatagttggattgagttaatgttggggattttgttttttttgtggaggggatttggtaatttgtagtggtagggtttggggttggtgtttgggagggatttgtgttttttatttattttttagttgtgtttttgttgtgttttggttagtttttggtgttggtgtttatggttggtttttgatagtgttttggagggattgggggagtttttaggtgtttgggtgagtagttaggtgtggttttttggtttttttgatttttggtgttagtttttgtttttttagttagggtgtggtggggtttgtttgggtagtgttttgagtaattgggaaggttaaggtggagggaaatttggttttggggagaagtgtgattgtagttgggaggtttttttagttttgtgggttgggtgagaataggtggtgttggtttgattaggtgttttgtgttggggtgtgaggatttggagtgaattgttgtgttttggtgggttgttttttttttttttttgtttttttgggtggttgtatgttgggttggttgggtaatggagagggagttgttaggaatgtggttttggggattgttttgtttggggaaggggagagggtggttatggtgttaggagaggtgtgggagttgagaggtggtgtgggggtgttattgttgttgtaggttggagagagattgtttttagtgaggtgtgtattgtttgggtgagggttttatttttttgtggtgtttttggaggtgggaaagttgggtgggtatgtgtgtagagaaaggggaggtggggaggttagttatttttggagttggttttgattttaatagattgtttagtgtttggggatgttgattttggggtgttgtggtgtttggttttatgtgtgtgtggggttgaggggttgggggtgtttttggttgtttagttttaataaagggtgtttttttttattttgtgaggaggggtagttttggagatttggtttttagtgagtggggttttagtgttggggaggtttatttttttttggggttgttattttattattattattgttttttttttttttttaaaagg

SEQ ID NO: 303 - DNA, 6090 bp, Artificial Sequence
  chemically treated genomic DNA (Homo sapiens)
ttttttgaagaaaaaaaaaaggtaataataatagtaaaatggtaattttaaaaggaagtagatttttttggtgttaagattttgtttgttgaagattgggtttttggagttgtttttttttgtggggtggagaggagtattttttgttaaagttgggtggttagggatgtttttgattttttagttttgtgtgtgtgtggggttgggtattatggtattttgaggttggtgtttttaaatgttgggtggtttgttgggattagaattggttttggaagtgattggtttttttgttttttttttttttgtatatatgtttatttagtttttttatttttagggatgttgtggaagaatgaagtttttgtttagatggtatgtgttttattgggagtaatttttttttagtttgtggtaatggtggtatttttgtgttattttttggtttttgtgttttttttaatattgtggttattttttttttttttttgagtgaggtagtttttagagttatatttttggtgattttttttttgttatttggttgatttggtgtgtggttgtttgggggagtaagggagggaagggagtggtttattgaggtgtagtagtttgttttagatttttgtgttttgatataaagtgtttggttgggttggtgttatttgtttttatttggtttgtggggttggggaagttttttggttgtgattgtatttttttttgaagttaagtttttttttgttttggtttttttagttgtttgaggtattgtttggataaattttattgtgttttggttgggaaagtaaaagttggtgttgggggttggggggattggggagttgtgtttggttatttatttgggtgtttgggagtttttttggtttttttggagtgttgttggaggttgattataggtgttagtgttggagattagttggggtgtggtgggaatatagttagggagtgagtggggggtgtagattttttttaggtgttggttttagattttgttgttgtgagttgttgagttttttttgtggagggaataaagtttttggtgttggtttggtttggttgttttttttatattttgaagtagttttttggttttttgttgttttttgggtggagggtggttggtaggtggttaatggggattttgtaagtgggttggtggtgtggtttatttatttttgagttgttttgttaggttggtgttgtgggttttgtgtggtgtttgttgttttttttagttttgtgttttgggtttgttggtgtgttttattgtgtatattttgtatatatttatttgttttatatttatgttggttggggagttagtgtgtttgtttggaatgtgggtgttttatttgtgatatattgttaagttgttttttgattgggttttagggaaatatggtttttttgttttgagatgtgtattgggattttagtttgtgttgggtatggtgtttggtatgggaaaattatatagaataaaatagatttttttaaatttttgttttttggaaatttgtattttggtgggatagatagataataaatatgtaagttaattaataaggtaattttggaggattagttttatgtttattatgaaataggttaatggaatagagaatggtaggaagggagtgtattttattagattgggtttttttgttggattggtgttggagttgaggtttgaaggtaagaaggtttgtaatttgaagaaagggttgaggtttttgagatttaaagaagtaatagagatgtagagtttatttgtgttattttatatgttattggttattgttgagttgaaatgtagttagttttaaattaattgtgttgtaagtgtaaaatatatattagagtttaagatagtatggatatgagaatgaaaaatattttatgaatatttttatatttattatatttttaaatgatagtattttggatatgttgggttaaataaaatatattattaaaattaattttatttgtttatttttttttttttgagatggagttttattttgttgttaggttggagtgtagtggagtgtggtaatttttatttttagggtttaagtgatttttttgttttggtttttttagtagttaggattatagttgtgtgttattatgtttagttaatttttgtatttttagtagagatggggttttattgtgttgattaggatggtttttattttttgattttgtgatttgtttgtttgggttttttaaagtgttgggattataggtgtgatgattgtgtttggttttatttgtttattttttaaaaggtggttattagaaaatataatagtatttatgttgtttgtatgagatttttgaggattgtgttggtttatataaagattttatatttattggagatttttatttattttttttattttttattttttgtttttatttaatgtttgggtggagatgaagaagggttgattttttatattttattgttggagaattttaaatggtgaaaagtttttaaagggaaatttattttattgtttagaatgatgaaaattgatagatgaagagatttttgatttatattgttgtttaaatttttaggttttttaaattgagttggtttaaatttttgtggtttaatagaaatttttaattgtgaagattttggttttttgaaaataaggtaaaataaaataaaagaatattttttaggttttatgttaaattttagttttttttttttttttgagatgggtttttgtttttgtggtttagattggagtgtagttgtgaaattttggtttattgtaaattttgtttttgttttttgggtttaagtgatttttttgttttaggttatttagtagttgggattataggtatgtgattatgtttggttaattttgtatttttagtagagatgtggttttattatgttggttaggttggttttgaatttttgattttaggtgatttttttggtttggttttttatagtgttgggattataggtgtgagttattgtgtttagttaaattttagttttaaataatattgtattaatgatttataggaagggtatataggaattaaggggaagtttttaaattgggagatggtattagtttaagtagtgggtttgataatataaaagggttttgagaggtgagaaatatagttaaaaataataataataataaaaaaagagtgatttatttgggaaaatgtaaatgaatatatttgttgggagaaaaaatttaaaatatagatgtttgggataaatttggaaggtgtttatggatgattgttatatgggtaatatttattttttgtaaaataaaaaatatattgtttgaggtaattaaaaggattgaatttatttggtagttagaatgttttaattattttaatggataatgatgtttattggagattatttggagtagtgaaaaagagtatgaaatttggagttataaaattagatttagtattggtggaattatttaatagtttaataattttggatgagttattaatttttgagttttttgtgtatattaatttagataagtattttagaaaggggaaatgtggttatttaaaaatatatttataaattttttgatatttttttaattaagaggtggagtttaattttttttttaataaatatttattaattttatttgtttgtttttaagaaaaggtagtggtagtggtatagtgtaatttatttttaaggttaggttataaggtattagagtttttgtttgtttgtttttttttttttttttttttttttttttttttttttttttttttttttttttttttatttattttaaagtttttagttgttatgattattttagggttgttatgtagagatatgtgataaaattatagaaagaatgagagatgtttagagaagttagttgtttagttttatttttatttttagttgtttatattttttagtttaagttttgtgagtaaaattaatgatttttaatgttttaagttattattttagagtggtttgttatgtagtaatagattatttttttaaaaagaaaaattaagaaaattttttttttaatatatattaggttttagatagatgaaataatttttttaattaatttttaaataaattagtggggtttttatttaataaataaataaataaataagtggttatttttattttatatgtaaatgttttagttttattatttgtgaaatgaagatgattatagatttttatatattttttgggtttgttgggagaatttaaagagataatgtatgaaataggattttgtatattataaaatatattagaatgttggatattttattttttattatgtttttagtaaaaaggatttagagaggtattttatatatagaaggtaataatataagaagttataaattatgagatgttagttgagaaggatttttataaaaataattatgatatggattatggattataataatgatggtgataatattttaaataaatttgattgtagattttagaatattattttatagttgtattagggtaaaataattattgttataagatttaataaattttagaggtttaatatattaaaaatgtgttatttgtttttagtataaaggtttgtagggtataagtagagattagttttatagtagttatttagaaatttaggtttttgttatttaatgaatttatgtttttttagtgtaagttttttagtttattttttttattttttggttgatgagagaagagataatatagggaggattgtattgaaggtttatgtaggaggttagatttgaagtttgagataattattttttggtaagatgtttttagtttaaagtggattatattattttatttttattttttggttgtttttttgtaatatggttttggttttattaagggttaatatttttaagaatgttttttattttgggaggttgaggtgggtagattatgaggttaggagattaagagtattttagttaatatggtgaaattttatttttattaaaaatataaaaaattagttaggtgtggtggtaggtgtttgtagttttagttatttgggaggttgaggtaggagaatggggtgaatttgggaggtggagtttgtagtgagttgagatggtgttattgtattttagtttgggtgatagagtaagattttgttttaaaaaaaaaaaaaaaaaaaaaaaaaagaatgtttttgtattgtggttttattattaaagattttgtttgttatgtagttgagagtttttgatagaggtagttatatgattgattttagttttttttagtattgagtgttaaaagtatttatttttttttattaaattatatttttttttattagataaaagtatagagtttattttgttttttattttgttttggatttgttagaaagtatgtggtaagtttagaaagtataaatttttatttaatgtttaatttattattttttttgattttgtttataagtattttttgagtatttagtgtttattaaatgttagggatatagatataagagaaatattttttgtttttaggtaatttagtttgatgagggagatggattaataaatagatttgtgattgtgttaaatataatttatttgttattttatatttaatttattttttgagttgtaagattattttaatgtattttttgttttttggttgttggtaggtttagttaatggggtatttgatatgagatgaaggagaaggaaggagagtgaagttaagatagttatttttttgtttttttttttgtaagattgttatagtttatagttaaatataggttgttgttttttattaggttttgttttttattgggttttttttttttgggttttggtaattatttttttttttttgtttttttgagtttagggttggtgttagttttgttattattattttgggtttttgttttattttttatggtttttttgtattttttttatatttttttgaattgttttaatttgagtattttatttttg

SEQ ID NO: 304 - DNA, 6274 bp, Artificial Sequence
  chemically treated genomic DNA (Homo sapiens)
ggattatttgagtttgggaagttgaggttgtagtgagttaaggttatgttattgtattttggattgggtaatagagttagattttgttttaaaaaaaagaaaaattttatggttttgtttatattatttatttgattttatatgttgtttattttttttattaaaatttttagtttattaattatagtttttttataattaatattttgatgtgataatgttttagtttaattattgtggttataatagaatgttataaattgggtgatttataaataaaagaagttgatttaggttgatttagaggttggggagtttaagagtttggtgttagtatttgatgagtgtttttttgttttattataatatgggagagggtattatgtgtgaagagagtttatttttataatatagttatttttataagaattaatttattgttatgagagttatgtgaatttatttatgaggatagtgggttaagtttttaatatatggattttttggggatatatttaaattatagtagttagttgtaatgtttgtgttatgttttattttggttttgatgtttgtgtagtttttttaaattgtgtttttgttttttagtgtgttttgtaatgtggaaatgatatattgggtaagaggagttgtagtaaagaggtttttagtgatgtagtgataagttgtggggagagggagtgttgtatagttttgttgtatgttatagttttttagtgagtttgtgtttttggattgtgaattttatgtttgttttttagtttttttagttttttagatggtatagaattgttggaggggggtggagttgtatattttttttgttttgggtaggttattttttgataaaatattaggttaggtttttggtgaaataattttttttgagggtagattttttattaataatagaatgttttaatttattttaaaatggttttttttttttttttattgttagaagtataatgagattttttttttaatatttgtggtaaggatttagtagagttttaggaggtaatatttttaagtgttttatattattttgtattatgattgggttttgttggagtttttaatttgtagaattgtttatattgagttttttgtaattttttaattatagggtaaatttttttagttggtattgggtttttggaggtttttgtttgttggtttttttttttggaggttgtgtttttgtgtttgtttgtttttttaatttggggggtagtggtttgtttaatgattttaattttttgaaagagttaagaagaggtgttaattttttggtttgtttagttttttatttgttgttagaatggagtgttaatagtgttttttatagtgatatgtaatttttaattttagagatgatgaagtatattaatgataaaggagaaatgttttagtagttttttgttagtatattattttttgaaaaagttgttttttttatattttgtaagagatgggttttaatttagagtttaaggtaaatgattttttttaaggagaaggaataaatagttttagaaattatgaaagtttgtttttaggagtgtttttgaattttagtaggggttatatttattttgtagaaataggtgaggtatgtttttggtataaaattttaatggtatagaaggataaattgaaaaataagtttttttttaaatttttgattttgagttatttagtttttttttttagaggtaaagttgttattagatttttgtatttttttaatatatatttttagaagagttgttaagtgaatatatgtttaagtgaaaatttattttagaagtgtatttttttaaggaattttagggttggaaggaatttgtgttagtttttaatttataatttttattagtatttattgtttttgtataaaaattttttttaaaaaagttttttttattttgatatagtttattttatttttatttagttttaataatttataaaatatatttttgaaagtttaaaatttgttattatgttttttttttttaattaatttttattttgatttttaagttagagaaaataggtggttaaatgttttttgtttaagatggaatttagaatatttgaagattttagatttttattttgttaaataatgtgttttttttttttttttatagagtatttggttttaggaaatttagagttatattttttatagataagattaaatttttatttaatatatttagaaattttttttaagaggataattatttattagaggaaaaaagttttttatgtatagttggtaaagggatggaattatttgtgttattaaaattgatagatgtttatgagatttattaagggaaatattagagttttagtatatatttgttaatatagtatatatgaaggttttatttataatttttttggttaagtagaaattttggtattatttattttaataaatttttaagatattatgaaatagaattttaggttttgatattattatttgttttaggttttgaagtgttgttggataagaggggtaaaatatggttttgttttggatttaaagttggttttttatattagtaagtatattttggtattttggttattttttttggttatagtattatattgttataaaaggtagatataagtattaattagtttataggttattagataagtttagtttgattaatgtttaatatagtaattgggttattattgttatttttgtggtggtggtatatatatttagtttttgtttgggttatggtttaggattattttttatagaggttgtgagttagagttttaattgtgtagggttttaattatgttaggttatttattttttttaagaggattttattagtgtttgtttggttatatagttttttatttattaagtaatatagttattagtatattttaggtattagttaaggattataaaattaatgtgaatgttagtttttgtattaaaagtttaaaggagaaatttaaattttatatagatgttttatgaagatgtttagtaaatttatttttttttgttttttggaatttattttagtattgtgttatgtgtgtgtttagtaattttttataaaaagttttgttttttgtgatgttattagattatattgaagaatatataagttgtattatgaaggttgttgttttatatagttttaatgtagtgagaattgatgtttttatatgttgtttttttgggtatttaaagaaatttttgtatagttttataaattagttgtagtttaaattgatttgtgttgtgatttgtatatataggttatatttttttgatagaaaatatagtttaaaattaaatttgtagtttttgttaagtgaatgtataggattttattgtatttaggttttttattgtaagatttatttttgtttttattttatgttttattgttgtgttttttatttgtttttttttagttttgttttttgtgtttttatggattgtttttagtttaggtgtgtaggaagtatatatatgtttgtagagtttttatggtttttgtatttagggtatgattttaatgtatagtggttgtattgatttgttaaaataaaggaatagattattttttttaatttatagggaagttttaggttgtgtgggtagtgagtagatttgtgtttgtttgtgtttgttttggtgaaaaattttattgtttaggttgtagggtgtgagatttaggtataaatattttgttggatgaggaggaaagatgtaaggttgtttttttttagagatagtaaagggtaggtttgtagttttatttattttaggattgtgatttttgatagagttgagagattagggttgttgaattaggtttgaaggttttagtgaattttgtgaagagaggaggggtttggttgtaatatggatttagaggatatttttattgtaggagaaggaatagtggggatggggtggatttgttaaaggaatatagtttaagtttttgtagtttaaaaaagtttagttttttttggttaaagtttttgtgagtttttttggtattttttttgtgggagttataggggtagtgggatatttagtttttttaaaagtatttttatggttgtttgtgttaagtttttattttaagagttttatttttgtgaagtaatgtgttttatatattggttttaaagtatttatggttggttgtaataaatattaaggaggtttgtttttgtatttggagttgggtgtttttattttagatgattttgagggtgtttgataagatttgaaggatttttggattttagagtattattttggatgtttggtatttttgttgtgtgggtatggtgatttttttagttgttaggttagtttttgatttttgagagggttttgtagtgttgtaggggaggtggggatttgaataaaggagtagtttttttgttggtgttattatttgatgttggttttaaggtttggttagtttgtttaaagttggtataagtttgttttgtaaaataaaagaagggaaagggggaaggggattttggtatagatttggtttgatttggatataggttgggtttgtaagtttgtggggattgggtttagaggggtagtgttgggaatgttttttttggaaattaattttttagggtatttgttttttttttatgtgttgttttatttttgttggagattaggttttgtgggggttattgttgtttattgtttttggtggttgttggttttgggtttttgttgttggttttttttttttttttttgtatttttttttttttttgttttttttgattttttttttgttgtttggttttttttttttttgttttgtttttttgtgttttggtttgtgtgagttagatgtttgggtagtttttggtgtagtgtggttgtagtagtttttgttttttgtatggtgtgagtgtttgatgtggttgaggtggttggagttttgagttagttttggtggttgttgttgtttagattggatgataggttattttgttggtgtttgtttgagtttttgttttgttgttaatgttataattattgtgtatggttttttgattttgtttagtattgattgggagagttggagtgagttttttggggagtagtgatgtgattttttgggatggttggggtagtgtttttggtgttgttggttgtgttttgtttggtgagttgggttttggaggaaaagaaaggtaagggtgtgttttgttggtttttgtgttgtttttggattgtgttttggattttgtagtttgtttaattgtgtattggtgtattggtttggtgtttgtgtttttgtttgtttttttttgtttttttgagattagttgtgttgttgattgggattgtgggaggaatgggatgttttgttttttggttgggagagtttggggtgggtggaggaggagatgtgtgggatattgggttgtaggttaggtggggaatggttgttgggatttttggtgttttgaattgtttttaattttttttttttattttttttgtttagttgtgtaggattggtgttagtgggtgaaagttgggtgttggtgggtgtttggggttggggttttgtatgtgtgttttgtgttgtttttttagggtgtgatggggttttggtgtgtatttgaggggtgggtgttgtttatttgttgagattgtattgtttagggaagttgaggaaggaatttaaaaatatagtttttttttggattttgtgggataggtggttttttgagaggatttttttgtttttgttttttgtgtaggttttaaattgaagttggtgtttgttagtttggttttggtttttttttaggtttttgtgatttttgttttttagtgtggagttgtagttttgatttgggagttgggagaatttgtttattattatttgtggtttttggggaggggtggtgttggtggtggttagtttttttgttggtaaaaggtaggtggggtttgatttgttttttgggtgtagattttggttgtttgttttgtttggtgtgtttttgttttgtttatttaagagtgttttttattttttggggattttagtttttttttgggtgtttgtgttgaaagttttaggtttttttttgatggttgttttgtggagatgtttgggtttgttttatttgtagttttttggttgtgtttgggttttgtggtggagtgggatgtggttgt

SEQ ID NO: 305 - DNA, 6274 bp, Artificial Sequence
  chemically treated genomic DNA (Homo sapiens)
atagttgtgttttgttttattgtgaagtttaggtgtgattgaagggttgtaggtggagtagatttggatgtttttgtgaggtggttattgaaggagagtttggggtttttggtgtgggtgtttaggagggagttggggtttttgggaggtggggggtatttttggataggtaagatgagggtgtattgggtgaggtgagtggttggggtttgtgtttaaggggtgggttggattttatttgttttttgttaatgaggaaattaattgttgttagtattatttttttttgggagttgtaggtggtggtagatgagtttttttagtttttaggttgaggttgtgattttatattggggaatgaggattgtggggatttggagaggggttggggttaggttggtgggtgttggttttagtttgagatttgtgtggagggtggaggtggggaggtttttttagaaagttgtttgttttgtggggtttgaggggaggttgtatttttgggttttttttttagtttttttaaatagtgtagttttggtgggtgggtagtgtttgttttttgggtgtgtgttaggattttgttgtgttttgggaagatagtgtggggtgtatgtgtgggattttggttttaggtgtttattagtatttggtttttgtttattgatgttgattttgtgtagttgggtggggaaagtgagggaagaaagttgggagtggtttggggtgttggaggttttggtggttgttttttgtttggtttgtagtttggtgttttatgtgtttttttttttgtttgttttagatttttttggttgaagaatgaaatgttttgttttttttgtggttttggttggtggtgtagttgattttaaggaaataggaaaggatgggtgggggtgtgggtgttgagttggtgtgttggtgtgtggttgggtgggttgtggggtttggggtgtgatttgggggtggtgtgggagttggtgagatatgtttttatttttttttttttttagagtttgatttgttgggtagagtgtagttagtagtgttaggagtgttgttttggttgttttggagggttgtattgttgttttttgaagagtttgttttggtttttttgattaatattggatggagttagggggttgtgtgtggtggttgtggtgttggtggtgaggtggggatttgggtggatgttgatgaggtggtttgttgtttggtttgggtggtggtggttgttggggttagtttgggattttggttgttttggttgtgttgggtgtttatattgtgtggggggtggaggttgttgtggttgtgttgtgttgggggttgtttggatgtttagtttgtgtgggttgaggtgtggggaggtagggtgggaggaggagggattaggtggtggaggagggattgggaggagtagaggaggaggagaatgtgaggaggagggaggagaattagtagtggggatttaaggttagtggttgttggaggtggtggatagtggtggtttttgtgggatttagtttttggtgggagtggggtggtgtatgggaggggagtgggtgttttgaggagttaatttttgagaggggtgtttttagtattgtttttttggatttggtttttgtggatttgtaggtttagtttatgtttaggttgagttaaatttgtgttagggtttttttttttttttttttttttttgttttataaagtaaatttgtattagttttagatagattggttgagttttagagttagtgttggataatggtattgatggggaaattgtttttttatttgggtttttattttttttgtagtattatgggatttttttggggattagaggttggtttggtagttgaggaggttgttgtgtttgtgtggtaggggtgttaggtgtttgaggtggtgttttaaagtttgagggttttttagattttgttaagtatttttgaaattatttgaaatgagggtatttaattttgggtgtagagataggtttttttaatgtttattgtaattagttatgggtattttgaagttaatgtgtgaagtatattattttgtaaaagtgaagtttttggaataaaggtttgatataaatagttgtggaggtgtttttagagaggttaagtgttttattgtttttgtagtttttgtaggagaaatgttagggaaatttgtggaagttttggttaaaagaaattgagtttttttgggttgtaggaatttgagttatatttttttggtaagtttattttatttttattgtttttttttttgtagtaaaaatgttttttaggtttatgttatagttagattttttttttttttatgagatttattaggatttttaggtttggtttaataattttgattttttggttttgttaaaaattataattttgaagtaagtgaagttatagatttgttttttgttgtttttgaaggggagtaattttatattttttttttttatttagtaaaatgtttgtgtttgggttttgtattttgtagtttgaatggtggggttttttattagggtaagtgtagatagatataggtttgtttattgtttgtataatttggaatttttttgtgaattaggagaagtaatttgtttttttgttttaataaattagtatagttattgtgtgttgaagttatgttttgaatgtagaggttatgaaggttttgtaggtatgtgtgtgttttttgtatatttgggttgagagtagtttgtagaaatatagaaaataaaattagagaaaggtaaatgggaagtataatagtggaatataaaatgaagataggagtgagttttataataaaagatttgaatataataaagttttgtgtatttatttaataagggttgtaaatttggttttaaattatattttttgttaagggaatgtgatttgtgtgtataagttataatataaattaatttaagttataattgatttgtaagattgtataggaatttttttgagtgtttaaaaagatagtatgtaagaatattagtttttattatgttaggattatatgagataatagtttttatagtatggtttgtatattttttaatgtgatttgatagtattataagaaatagagttttttgtaaagaattattagatatatatatagtataatattgggatggattttagggaatagagaagaatgggtttgttgaatatttttatgggatatttatgtaaagtttgagttttttttttgagtttttgatataaaagttgatatttatgttgattttgtagtttttggttagtatttggagtgtgttgataattgtgttatttggtaagtaaaaaattgtatggttgagtaggtattaatgaagtttttttaagagagataagtagtttggtatagttagggttttgtatagttagggttttagtttatagtttttgtggagggtggttttagattatggtttggatagaggttgggtgtgtgtgttattattataggaatgataatagtggtttagttgttgtgttaagtattggttagattaagtttatttgataatttgtgagttggttaatatttgtatttgttttttatagtaatgtgatgttgtggttgggagaagtgattaggatattaaggtatatttgttagtatgagaggttaattttgaatttaaggtagagttgtgttttattttttttgtttagtaatgttttaaaatttgagataaatggtgatgttaggatttaaaattttattttataatgttttggaaatttgttagggtgagtaatattaaaatttttgtttggttaaaaaaattatagataaagtttttatgtatgttatattagtaagtatgtattaagattttagtattttttttaataaattttataagtgtttgttaattttaataatatagatggttttatttttttgttagttgtatatgagaaattttttttttttgatgagtggttatttttttagaagaagtttttgagtatgttgaataagagtttagttttgtttataaggaatgtggttttgaattttttaaaattaaatgttttgtgaaaggggaggagaaatatgttatttggtagggtgaagatttgaggtttttaaatattttaagttttattttaggtaaaaggtatttgattatttgttttttttggtttagaggttaaagtaaagattgattaggaaaaaaaaatatagtggtagattttagatttttaaaaatatgttttataagttattggagttaagtaaaagtagaataagttatgttagagtggaaagggtttttttgagaaagatttttgtgtaagaataataagtattaatggaggttgtgaattaaggattgatataggttttttttaattttaaagttttttaagaaaatgtatttttaaaataggtttttatttaaatatgtgtttatttgatagtttttttaaggatatatgttaaggagatataagaatttggtaatagttttgtttttagggaggagaattaggtagtttggggttaggggtttagagggagatttgttttttaatttgtttttttgtattattgggattttgtattaggagtatgttttatttatttttgtaaggtaagtgtggtttttgttgaggtttagggatatttttgggggtaggtttttatggtttttgagattgtttattttttttttttgaaggaagttatttgttttgagttttgagttgagatttattttttgtagaatgtggaagaagtagtttttttaaggggtaatgtgttgatagaaaattgttgaagtattttttttttgttattagtatgttttattatttttagagttgagggttatatgttattataggaggtattattggtgttttattttagtaataagtagaaagttgagtaaattgaaaaattaatatttttttttagtttttttagagaattgaggttattgggtaaattattgttttttaaattggagagataggtaaatatagaagtataatttttagaggaagaaattagtagatagaaatttttaaggatttagtgttggttgggaaagtttgttttgtaattgagaaattgtgggaggtttagtgtgggtagttttgtaaattaagaattttagtagagtttagttatggtgtagggtagtatgagatatttgagagtgttattttttggagttttgttaggtttttattatgaatattagggggaaaattttattatgtttttggtagtggaaggagaagaggaattattttgaaataggttggaatattttattattaatagaaggtttgtttttaggagaaattattttattagaggtttaatttggtgttttattagagggtgatttatttagagtaagggaaatatataattttatttttttttaatagttttgtattatttaaggggttggggaagttgagaagtaagtatgaagtttatagtttagggatataggtttattggaagattgtgatatgtggtaggattgtgtaatattttttttttttatagtttgttattatgttattagaagtttttttattatagttttttttatttagtatattatttttatattgtaaggtatattaaaaggtaaagatgtagtttgaagagattgtataagtattagaattagaatgagatatgatatgaatgttataattaattgttgtggtttgaatgtgtttttgaaaagtttatatattggaaatttaatttgttgtttttatgaatgaatttatatggtttttatggtggtgggttaatttttgtgggagtggttatgttataagagtaagttttttttatatgtgatgtttttttttatgttatgatgaagtaagaagatatttattagatgttagtattaagtttttggattttttagtttttaaattagtttaaattagttttttttgtttataaattatttagtttgtggtattttgttataattatagtaattggattaagatattattatattggagtattaattataaaaaaattatgattaataggttaggagttttaatggaaaaaataggtaatatgtaagattagatggataatgtaagtagagttatggaattttttttttttttgagatagggtttggttttgttgtttaatttagagtgtagtggtgtgattttggtttattgtaattttaattttttaggtttaggtgattt

SEQ ID NO: 306 - DNA, 3000 bp, Artificial Sequence
  chemically treated genomic DNA (Homo sapiens)
atatttaaattgtatatttggtttgtaatatattatatatttaaaagaattattatttttttgaatattattaatattaataatagtattatagtgattaagagtggatttaaataaaggttggtttgaaatttaggtttgttatttattagtaagtttttaaaaattttgagtttttagtttttttatatgtgaaatggagaaaataaatttgtaaaattaattaaatttgtttatttatatttttttttttagtgtatattaattggtattttttgttaggttagaatgtgtttttaattatgttttaaatttgttttgtgttaattttattgttagaattttttttattttgagaattagaaaaggaaatattatgtttggtaatgtttatattttttaaaataaatttgtaggaaagaatatttagtaagtgatgagagtagtaatgattgtttttattattttaaatttataatattattttttttagagttttttaagtattgtagataattttttatttattaaaaaataaattgtaattataagtatttagggttgatattgtttttgaattagatagtgtttatattagttgtataagattaatttaaagtagaggatgaaattttttttttgaattttttttagaatgtaatttagtgaatatattaaaattaaattttttttgaatgggagtaatttttatggattaatttgtaattttttagattatatttaaggtaatgtagaggttgttgtattataggttttgtgattagagattattggatttgtttttggaaaagttatttatgattttttgggttttggtttttttattttttatattggtttaataatgattattgtagagttgttatggaagttaaatgaatttatgtattataagtgattaatataatgattgatatttagtgatttattaataaattaaaatatttattattaatatgatagagaaggtgttgttaaaatagataataggtttttggaagaggtgattaaatggatgtaaaatttatggattgtttattttgtttatttttgttgtgttttttggttgtggtatatatatgtgtgggtataaaattgtaaattttatgtagttgtgtagtgtatgtgtagaaggtttagatatgaaatgttattttagtaatgtgtttagagaagttttgatgttgttttggaagtaagttgttgttgtttgatttttgggtgtttgggatggatgtttatatttgtatttagtagtattggaaggggtttaggttttttgtagtatagtttatttttagattgtttagttttttataatatatatttttatggaaaagggtatttttttttgttagaaaaagtgttttagtttggtttgggttggtttttattttatgttgttgtaagtaggtgaagttttttttgtttttttttttggggtaagtggaaaggagtttggtagggggtttgtagtggtttgtataggggaattgggtagtgagagagttttaggtaattttgggggttgttttatagaagtaggtggggattgatagtggttttttggtttagggaggagagtgtggttgtgggtttttttttttagtttggaggttgtagttgtttgagttggtttgggtgggggtggggtgggggtggtgtggagggtatggagattatggtggtgttatttgggatatttagggttttgaggttttgggtggtttttatgtgagattgtaaattatgataataggtagttatttgaggttaaataaaaatggagtgggttttttgtgtgttgttgttttttgtgtttttggtggttttttttgaggtttttggtggttttatgagtttgtagtagttggtggtgatgttgtttttgttttatttttttgtgtaagtgtgaggttgttggtagtgtggtgtatgttttggttgtttttggtttttgtgtaaaatttttattttgtttatgtgaagttgttgttgttttagagagggggaaagagttgtgggaaaagttggggagtgatgattgtggtggttgggtgtgtttttttattttttttttttttttttttttttttgttgtagtttggagttttggtttttttttttttttttttttttttggagttggtttttttttttgttttgttttttttttgtttgtgtatgttatttgttgtggggtggttgaaggggatgttttgtttttattagaggtatagtgtgaaggggaaattttgatattggaaggaatgagaataaatatttaattatggatgtattgaattgtggttgggatagatattttgggaatttgaggtggattgggtgatgaggtgagtgatttttttttttaatttttgttttagggtttttgggggagtttgagttgagagaatttttaaattttttgggaaagtgtgtgaggttttgttggggatgttgagtgttgggtattgaggatgtgtagttggatggtgtgtgggtgtttgtgtttttggggggtgtttggaggttgggtgttttatgtttgagggtttgggttgtttggattgtagtggtgttttttgttttagaagatgtttttaagttttaagggttttttttgagtttgtttgttttttttggggttggtgtggagtttgtgtgtaatggagtttatttagtagtttagtgtgtggtttttatttgtattttgtttttatttggtagaggtgtgagtattggggttttttttatattttttttatgatgtgtattattttttgatgattttttagatggtttaggtgtgaggatgttgatttagagttttttggagggttataggtgtttgggtttttttggtgttgggtgtgtgtgtattttaaaggtttgtgttttaatttttaggtattgattgggttttttaattgtggtgattttattttaatagtttttatgtggtgtggattgaatgtt

SEQ ID NO: 307 - DNA, 5649 bp, Artificial Sequence
  chemically treated genomic DNA (Homo sapiens)
tggtggtttatatttgtaattttagtattttgggaggttgaggtaggtggattataaggttaggagattgagattattttggttaatatagtgaaattttgtttttattaaaaatataaaaaattagttgggtgtggtggtgggtgtttgtagttttagttattttggaggttgaggaaggagaatggtgtgaatttgggaggtggagtttgtagtgagttaagattgtgttattgtattttagtttgggtgatagagttagattttattttaaaaaaaaaaaaagaaaaaagaaaatattttaagttttgaggattatatagtttttgttgtaattatttatttgggttattgtagtataaaaataaatatagataatatatatatgagtgagtatggttggggtttaataaaattttatttatataagtaggtgatgaattatggtttatagtgttttaatttttgatttagatggtgaattattatgagtttttgttgttttttttggtagaaatatgggagaaattatagagagaaatagagattttaggaaaatagtaaaattaaataaataaagtgagatgttgttttttttggaggttgtaggttgtgttgaatttgtgtgtgtttgggtgtatagggatgtgagtagatgtgtgtggagatgtgtgtgtgggtggagattgagtgtggttggaggtggttgtggtaggatgttagaaggaaggagtttgtatttagtttttttattagtattttttggagttgttgaggggatgttattgttgaatattgattttggtgtaggttaaattgaagttagtttttgttattttttgttgggtgaggtattggggagaatagtgggattgaatggggtgggtttttttttttttatattttttttggaaatatttagtattagtatattagaatatggggagttattttttttagtgttgttttttaaggtttggaaggggaaattttgattttaagttttgtttgaagagtgatagtaaaggggagaggttggttgtggtttggtggtgtttattttttttttttgttttgaaattataggttggtatattatttgagagaatgattagtgttattaagggaagggtataagtttattggttttaggggagatattttaggggataggaatattttttgatgttgaatgagtgtagtatatagatggagaatatatataagagaaattatgaggatatgagagaaggtattggtaataggaagttataaaaagtaataaaaagaaagagtagatataaaaataataattgaagaaagttaataatagatgggatgaattatatgaggtatgtgatttatggatgaagaggtgagtgatgagattagttggggaatttttttttaggaaagataaattagaagaaatataaatgatattgaagtggttaggtgtagtggtttatgtttgtaattttagtattttgggagtttgaggtaggtggattatttgaggttaggagtttgagattagtttggttaatatgatgaaattttgtttttattaaaaatataaaaattagttaggtgtggtggtaggtatttgtgattttagttatttaggaggttgaggtaggagaattatttgaattaggaagtagagattgtagtgagttgagatggtgttagtgtattttagtttgggtagtagagtgatagtttgtttaaaaaaaaaaaaaggtagtaaagtgataggaggatagattagaagggttattttttagatagtgtaaggaagaaagaagaagaagaagaggaggaggaggaggaagaggaagaagatggagaagagggtattttagaagaaataatggagatatattttttaaaattgaagaaagatgattaattttagattgaaggttaagaggtaaattagagagatagtttggtaagttaggaagagtattaaagttagataattagagtgaaattaaagaaaatttaaggtgataaaaatttaaaaagtttttttgtgattttagtttattggtgaaaatttaaaaaaaaaaaaaaaaaaaaaaggatagtttgggtaatatggtgaaattttatttttataaaaaatataaaaattagttgggtgtggtggtatatgtttgtagttttagttatttgagaggttaagtaaggtaggaggattatttggggttaagagttttagattagttgtggtaatatatatgttgtgggaagttaggtattttgaatggagggattggttgaagttatggtagaagaatataaattgtgaagattttatggatatttattatttttttaattaatatttttgtgattttttatgtttgtttttaattttttaattttgttatttttgtaaattgaggatgtatgttgttttaggattttgtgatgattgtgttaattgtataaattgtttgtagaggataattgttgtgtgtttgagtaatgtgaaatttgggtattttaagaataggataatagtaatttttagggaataagggagataattttaaagtttggttgtttgtgggttgggtaggatagagttatattttttttattattgtaaataggtaagagaaatattgttgaattttttttttagtaaggaatattaataattaatagttttgagaaaagaatgtatttttagggttgggttattgaaatggtttttttgagagtgtttgtttttatttagaagtagaaagggatgaaatatgttttagttttttgtagtatttttagatttgataggattaggaaattttagtttggtaaattttagttagattggttttttgtttttgaattttgatagtgtgtgttagtgggatttggaagtttattagtgattttagttttgttgtgattttttgttttgtgattttttgttgtttttgaagtatgtgatttttgtgatttatattttgtttgtgtatttttttttttttgaaaattgttaataaaaatttgttggttttatggtttagggggtattatggaatttgtggatatgtgatgttttttttggatatttggttttaaaatgttttttttttgtattttttttttttattttttaggttagttgatatttagggaaaataggaaaggatttatgtgaaatattgggggttgaattttttttgataataagttttttaaaaaagatttttaaatgaaatttttttgttttttaatttttatttttgttttgggggtatatgtgaaggtttgttatataagtaaatttgtgtttttggtgtttgttgtatagaatattttattatttaggtattatgttgagtatttaatagtttttttttttgtttttttttttttttttattttgtattttggagttaattatagtgtttgttgtttttttgtttgtgttataagtttttattatttagtttttatttataagtgagaatatttagtatttggatttttgtttttgtattagtttgttaaggataatagtttttagttttatttatgttttataaaagatatgatttagttttttttaatggttgtattaaatgaagttttaaagatataatataaatattaattttttttttattataaaaattttttgttgaatttgattatatttaaattaatgagttttgttttatgaaagattttttggataaatttgatagttgatggaataggagaagttgtttgttatgtttaaagttaataagagattaatatttagaataaatggagatttgtaaattaatagaaagtaggtagtaaagttaaagaaaatagtttaaggtatagttattaaaaggaatgtgattatgttttttgtagggatatgggtggagttggaagttgttagttttagtaaatttatataggaatagaaaattagtgagattgtatggttttatttataagtgggagttgaataatgagaatatatggttatatggtggtgattaatatatattggtgtttgttgagtggggtgttggggagggagagtattaggaagaatagttaagggatattgggtttaatatttgggtgatgggatgatttgtatagtaaattattatggtgtatatatttatgtaataaatttgtatattttttatatgtattttagaattttaaataaaagttggatggttaggtgtggtggtttatgtttgtaattttagtatttttgggaagttgaggtgtgtagattatttaaggttaggagtttgagattagtttggttaatatggtgaaattttgtttttattaaaaatataaaaattagttagatgtggtatgttatttataattttatttatttgggaggttgaagtagaattgtttgaatttgagagtggaggttgtagtgagttgttgagattgtgttattgtattttagtttgggttatagtgtgagattatgttataaaataaaataaaataatataaaataaaataaaataaaataaaataaaataaaataaaataaaataaaataaaaaaataaaataaaataaaataaaataaaataaagtaatttttttttttttaagtggtttttattttttttttttgttttgtgaagtgggtgtgtaagttttgggattgtagtggttttagggaatttttttttgtgatgttttggtgtgttagtttgttgtgtatattttgttgtggttttttttttgttgtttgtttattttttaggttttgttgggatttgggaaagagggaaaggtttttttggttagttgtgtggtgattttggggattttagggtgtttttttgtggttgatgtttggggtgtagtggttgttggggttggggttggtgggagtttgtgggattttttagaagagtggttggtgttgtgatttagtattggggtggagtggggtgggattatttttataaggtttggaggttgtgaggttttgttggagttttgttgttgtagtttttgttattagtgagtatgtgtggtttgtgtttttggggatggggtttagagtttttagtatggggttaatttgtagtattaggtttgggtttttggtaggttttttgtttattttgagatttgggatgggggtttaggggatttaggatgtttttagtgttgttagtggtttttagggggtttggagtgttttggggagggatgggattttgggggtggggagggggggtagattgtgtttattgtgttttggtatttttttttgggttttagtaaatttttttttgtttgttgtagtgttgttttatattgtggtttattttttagtttgaggtaggagtatgtgtttggtagggaagggaggtaggggttggggttgtagtttatagttttttgtttatttggagagatttgaatttttttatttttttgttgtgtggtttttattttgggttttttttttgttttttgttttttttgttatgtttgttttttgttttagtgttgtgtgaaatttttggaggaatttgtttttttgttttttttttgtatttttgatttttttttgggttgttgtgaggtggagttggtttggtttttatattttgtatttttttttttttgtagt

SEQ ID NO: 308 - DNA, 5649 bp, Artificial Sequence
  chemically treated genomic DNA (Homo sapiens)
gttgtggggagggagaagtatgagatgtggggattgggttgattttgttttgtagtaatttggggaggggttaggagtgtagggagggaatagggaaataggtttttttgaagattttatataatattggggtggggagtaggtatggtgggagaggtggggaataggaaggaggtttggggtaaaagttatatgatggagggataagggggtttggatttttttgggtgggtgaggggttgtgggttgtagttttagtttttgttttttttttttgttagatatatgtttttattttgaattgggaaatagattatggtgtagggtggtattgtagtgaataaagaaaagtttgttggagtttgggggaggatgttaaggtgtggtgagtgtagtttgttttttttttttgtttttggggttttatttttttttgaggtgttttgggttttttgaaagttgttaatggtattggggatgttttgggttttttaggtttttgttttgggttttgaggtgggtgaggagtttgttgggagtttgggtttgatgttgtgggttggttttatgttgggagttttgagttttatttttggggatgtgggttgtgtgtatttattggtggtgaagattgtggtggtgaaattttagtgaagttttgtggtttttgagttttataagggtggttttgttttgttttgttttagtgttgagttatggtgttggttgtttttttggagggttttgtggatttttgttggttttagttttggtggttgttgtattttgggtgttggttgtagaggggtgttttggagtttttggagttgttgtgtagttggttggggaagttttttttttttttttaggttttagtggggtttagggagtaaatagatagtaggaagaggattgtagtgaagtgtgtgtagtgaattggtgtgttgggatattgtggggggaaattttttaagattgttgtgattttggagtttgtatatttgttttatagggtaggggagaggggtggaggttgtttagaggaaaggaaattgttttattttattttattttattttattttatttttttattttattttattttattttattttattttattttattttattttattttgtgttattttattttattttatgatgtagttttatgttgtggtttaggttggagtgtagtggtgtgattttggtggtttattgtaatttttgtttttgggtttaagtaattttgttttagttttttgagtaggtggaattataggtggtgtgttatatttggttgatttttgtatttttagtagagatggggttttattatgttggttgggttggttttgaatttttgattttaggtgatttgtatgttttggttttttaagagtgttgggattataggtgtgagttattatgtttggttgtttaatttttatttgaagttttggggtatatgtagaggatgtgtaggtttgttatataggtgtgtgtgttatgatggtttgttgtatagattattttattatttaggtattaagtttagtattttttagttattttttttggtattttttttttttagtattttgtttaataggtattagtgtgtgttgattgttgttatgtgattatgtgtttttattgtttagtttttatttataagtgagattatgtggttttgttggttttttgtttttgtgtgagtttgttgaggttaatggtttttagttttatttatgtttttgtaaaggatatgattatgttttttttagtggttgtgttttaggttattttttttggttttgttgtttattttttgttgatttgtagatttttatttattttagatattgattttttgttggttttagatatgatagatagttttttttattttattaattgttaagtttgtttaaggagttttttatgaaataaaatttgttaatttaagtgtaattaaatttagtaagggatttttgtggtggggaagaggttggtgtttatgttgtatttttaaaattttatttaatgtagttattaaaaagaattagattatgttttttgtgggatatggatggagttagaggttattatttttagtaaattaatgtaggaatagaaatttaaatattggatgtttttatttgtaagtgggagttaaatgatgagaatttataatataaataaggaaataatagatattgtggttgattttagggtgtaggatgggaggaaggagaggagtagaaaagagaattattgggtatttggtataatatttgggtgatgaaatattttgtataataaatattgaagatatgagtttatttatgtaataaatttttatatgtatttttaaaatagaaataaaagttaaaaaataaagaaattttatttaaaagttttttttaagagatttattattgggggaaatttagtttttaatattttatgtgggtttttttttattttttttaagtgttggttggtttgagaaataaagggaaagagtataaaagagagatattttaaagttgggtgtttaggggagatattatatgtttgtaggttttgtgatgttttttgagttgtaaaattagtgagtttttattagtaatttttaaagaggagggagtgtatgaatagggtgtgggttatagagattatatattttaagggtgataaaagattatagggtagaaggttatggtgaaattagaattattaatgaatttttaggttttattggtatgtattgttagggtttaagagtagagaattggtttgattagaatttgttaggttggaattttttaattttattaagtttgggggtgttgtaggagattagggtgtgttttatttttttttatttttgaataaaggtaggtatttttagggaggttattttagtggtttggttttgggaatgtattttttttttagggttgttaattattaatattttttattggggaaagaatttagtgatattttttttatttgtttgtggtaataagagaagtatggttttgttttgtttagtttataggtagttagattttaaggttattttttttgttttttgaaaattgttgttattttgtttttaagatgtttagattttatattgtttaaatatataataattgttttttataaataatttgtgtagttaatgtagttattatagggttttaaggtgatatatatttttagtttatgaagatgataggattaagagattaaagataggtataggaaattataagagtattgattggggaagtgataaatgtttatgaaatttttataatttatgtttttttgttatggttttagttagtttttttgtttggggtgtttgattttttataatatgtatgttgttgtagttggtttggaatttttggttttaagtgatttttttgttttatttagttttttgaatagttgggattataggtatgtgttattatatttagttaatttttgtattttttgtagagatggggttttattatgttgtttaggttgtttttttttttttttttttttttttaaatttttattaatggattgaggttataaggaagttttttaaatttttgttattttgggttttttttaattttattttaattgtttagttttggtgttttttttggtttgttaagttgtttttttggtttgttttttggtttttggtttgaggttggttatttttttttagttttgagaaatgtatttttattgttttttttgagatgtttttttttttgtttttttttttttttttttttttttttttttttttttttttttttttttttgtattatttggaaaatggtttttttaatttatttttttattattttattgtttttttttttttttagataggttgttattttattgtttaggttggagtgtattggtattattttagtttattgtaatttttgttttttggtttaagtgatttttttgttttagttttttgagtagttgggattataggtgtttgttattatatttggttaatttttgtatttttagtagagatagggttttattatgttggttaggttggttttaaatttttgattttaagtgatttatttgttttgggtttttaaagtgttgggattataggtgtgagttattgtgtttggttattttgatgttatttgtgttttttttggtttgttttttttgggagagagttttttagttgattttattatttatttttttatttatgagttgtatattttgtatgatttattttatttgttgttggttttttttgattattgtttttatatttattttttttttttgttgttttttgtaattttttattgttagtgtttttttttatgtttttatgattttttttgtgtgtattttttgtttgtgtgttgtatttatttagtgttaggggatgtttttgttttttgagatgttttttttggaattagtgagtttgtgttttttttttggtggtattggttatttttttgggtagtatgttagtttgtggttttaaagtaaaggaaggagataagtattattaaattatagttaattttttttttttgttattgttttttaaatagagtttgaggttagagtttttttttttgaattttgggaagtagtgttggggaaggtggttttttatgttttaatgtgttggtgttgggtgtttttaggggaagtgtgggagggagaaagtttgttttatttagttttattgttttttttagtgttttatttagtagagggtagtagaggttaattttggtttagtttgtattagggttagtgtttagtagtgatatttttttaataattttagagagtattaataaaggaattgaatgtaaattttttttttttggtattttattatagttatttttagttatgtttagtttttatttatatatatatttttatgtgtatttatttatatttttgtatatttagatatatataggtttaatatagtttgtagtttttaggaggggtgatgttttattttatttgtttaattttattgtttttttgaaatttttgtttttttttgtggttttttttatatttttattggagagggtaatgaaagtttatgatagtttattatttaaattaaggattgggatattatggattgtggtttattatttgtttgtgtaaataaagttttattgggttttagttatgtttatttatgtgtgtgttatttatgtttgtttttgtgttatagtggtttaaatgagtgattgtaatagagattatgtggtttttaaagtttaagatatttttttttttttttttttttttttgagatggagtttggttttgttgtttaggttggagtgtagtggtatgattttggtttattgtaagttttattttttgggtttatgttattttttttttttagtttttagagtagttgggattataggtgtttgttattatatttggttaattttttgtatttttagtagagatggggttttattgtgttagttaggatggttttgattttttgattttgtgatttgtttgttttagttttttaaagtgttgggattataggtgtgagttattg

SEQ ID NO: 309 - DNA, 12781 bp, Artificial Sequence
  chemically treated genomic DNA (Homo sapiens)
tattatgttgttagttggttttgaatttttggttttaagttatttttttgttttggttttttaaagtgttgggattgtaagtgtgagttattgtttttggttagttggtgatttatttgtataattgtttaatttattgaatatgtatggtgtgttaagtattgggttgagggttttataatgtttttttatttaatgtttagtataatttatgaagaaggtagtgttaatattatttttgttttatagatgtagaaattgaggtataggttaaataatttgtttaataagtttgtgtagtttagtaagtagtttagttgggatgtgaatataaattttgaatatagagtttttaattagtaggttagaggtttttaaatatttagtatatttattattttagtatttttttgttatattttttaggttaaaataattttattgattgttatgtaatttattaagtgtagttatttgaaaaaaaaatatatataaaagaaaaatatttttatttagtttttaaaataatttatatatagttatggaatgtatgtgttggttgggtattgtagattaaagatagtttagggttgggtatggtggtttaggtttgtaattttagtattttgggaggttaagtagagagaagggtttgagtttaagagttggagattggtttgggtaatatagtaagatttagtttttatagaaaataaaattattagggtgtgaggatgtatatttgtagttttagttgtttgggaggttgaggttggaggattagtttgggtaatagagtgagattttgttttagaaaaaaaaaaaaaaaaagatagatttttatttagatatgtatgtaggagtttatagaaaaaaaaagtgagtttaggaggttgttatttggtatttatataatttttttttttttgaattttgaaatttattttatatatattatttaataggggaagaggagggagaaaaagttttttatgggaagaataaataggtttttgggggaataaaagggagataagaatgtttgtttttgtaggtgtaagtggtttttgtttttttttttggttattaaaatttttttagagaggagatttatggtagttttatttttagaaatttttgttgttagttgtataagggaagttttgaaatggtatttttttgtatttgttggtttttaaatgtttttagttttaagtaatatttatgttaattttgggggtttgagtgtttttatataatatatgtgtttttttgttttttaatgaagtttgtgggaggtatttaattgtagtttttaaaatttggtttataggtattattgtttttattaaagatgaggaaataagtttagaaaagtattaattgttttgagttatttgtttggttagttaggattagagtttagttttttatttaatttaaagtttaggtttttaattttttataattggtgtattttttttgaatttttattttttttttgtaaaagaataatattggttgggtgtagtggtttatatttataattttagtattttgggaggtagagatgggtggattatgaggttaggagtttgagattagtttggttaatatggtgaaattttatttttattaaaaatataaaatttagttgggtgtgttggtgtttgtaattttagttatttaggagattgaggtaggagaattgttttaatttgggaggtggaggttgtggtgagttaagattgtgttattgtattttagttttggtgatagagtaagattttatttttaaaaaaataaataataataataaaaagagaataatgttatatttagttgaattaaaatgaattaaatattaatatttgtattttaaaaatggtttagtttggttgggtgtagtggtttttgtttgtaattttaatattttgggaggttgaggtaggaggattatttgaggttaggagtttgagattagtttggttaatatggtgaaattttgtttttattaaaaatataaaaattagttgggtagtagtagtgtgtgttggtaattttagttatttaggaggttgaggaaggagaattgtttgagtttgggaggtgaaagttgtggtgagttgagattgtattattgtatattagtttgggagatagagtaagattttgttttaaaataaaataattaaaaaattaaaaaggtttagtttgggtaatatagtgaaattttgtttttatagaaaatttttaaaatattagtagggtattgggtatagtggtttatatttgtaattttagtattttgggaggttgaggtaggtgggttatttgtggttaggagtttgggattaggtaggttaatatggtgaaattgtgtttttattaaaaaataaaaattagttgggtatggtggtaggtattagtaattttagtatttaggaggttgaggtatgagaattgtttgaatttgtaaagtaggggttgtagtgaattaagatggtgttattgtattttagtttgggtgatagaataagattttttaattaaaaaaaaaaaaaattagttgggtatggtgttgtgggtttgtggttttaggtatttaggaggttgaggtgagaggattatttaagtttgggaggttgaggttatagtaagttaagattatgttattatattttagtttttgtgatagagttagattttgttttaaaaaaattttaaaaagggtaaattttggtaattttatatagtttaatttagtataaggtggttgtaataattaaatgagataaaatggtgttaaattggaagtattatagtatttttgttaataatatagggttttagaattagtttttttgagtttaaatttaggttttattattttttagttatgtagttatgggtaagttatttgatttaattgtgttttagttttatttatgatatggagatataggataattagttttttatgtgtaattttgaaatttaaaaagttttgtaaattaaaagtttgggggtaaatttatttggtagtaaattttgatttgaggttatttatagtttatattttgtattttttttatttagtatgaataagtatgtaagttttattgtatgtttgattttagtatgtttttttagattttttgggggtgtttatgtatgttggtgggggaaagagattaatttttaaatattattttaaatagttggttttattgtgtttgtttgggtagtatatatattaaaattggaatgatttttgtatagggatgaaatgtaaatttgtgaagtatattgtattttttttagtatatattatttttggtaatattttttttttttttttgagagggagttttgttttgttgtttaggttggagtgtagaggtgtgattttggtttattgtaagttttgttttttgggtttatattatttttttattttagtttttttagtagttgggattataggtgtgtgttattatgttaggttaattttttgtatttttagtagaggtggggttttattgtgttagttaggatggttttgattttttgattttgtgatttgtttatttttgttttttttttgaagtgttgagtgttgggattataggtgtgagttattgtgtttggtttttgttttttttttttagattgattttattatttgtttagtaaaggagaattttttggtagaatagtttttaagaataaggtaaataattaattttatataggtttttattaatgtatagttgttgattgtgattggtttttggtaatttggattttataatttggataaggggataaataattgtttgttttttattattttttttgaatttgaatagaatttttttatttttatagttttttagtttttttttttttttttttgagatggagttttgtttttgttgtttaggttggagtgtagtggtgtgattttggtttattgtaaatgttgttttttaggtttaagttatttttttgttttagttttttaagtagttgggattataggtgtatgttattatgtttggttaatttttggatttttagtagagatgggggttttattatgttgattaggttggtttttaatgtttgattttaggtgatttgtttgttttggtattttaaagtgttgggattataggtgtgagttattgtgtttggttttttatagttttttagttttttaaaatttgaaaaattttgtaaagatatatttgggttaaagggtttagataatggattgtggtttttaagtatttatgttataggttattgagaggattgatttagttattagatgtaaaatgttgggattagtgtttggtaaaggaaaattttgtatagttgtaggtttttattatatataatagtattgttaatgaatgttattataatatttatttagtgtttattaagtgtttattttatataaattttgagaatataatgtgaaggtgaattgttgattaaagtttggttttttttgttttgtttttttgtgaaaatgttttaatggtaggaggttatgtgagtgttggatgtgtttttttttgtgagtttttttttgaggttttttgggtttttttggttatttttgtttgggtggtgtgtgtttttgttgtttttgtttttgttttagagaggtagggttttttgagtttgttagttttgtggttgtaattaattttgggttggagtgttttggtttggttagttttgtggtgtgagggaaggggagtttagtagttttttgtgtggggtttaggtgttggtggtagggtgggttttttattgttagtgtgttagttttgtttttatttattagtgtgttagttttgtttttttttatgttgttgtgtgtttgggggtggggtttggtgtgtattgtttgtgtatggtgaggtgtttgttgattggttattggggtttgggtttttttggtggagtgtgtttttttttagattttttgttagtaggagttgtgtggtagatgtggtgtttttaggagttttgtttgatagaatggttgggttttgttggttgttggtatgttgtgatagagtattttgtatagttttttttttaagtttttggtgttgagtgatgttaataaggttttggttagggttttatgtgaaggtggttgtgttgttgttgtttttggggtttttttttttttaggtggggatgtggtttggagtgaggttgggtttgggtttaggtttttggtgtgttttgtgttattgtttaaggtgaagaattttaatggagggttgtggagattggtagtgtttgttgtttttattaggtagtggggtgggggtggggttgaaggtgggggtatagtggtggggtgtttggaatttggtgaggggaggtttgtatagggggttgggggggtgtatggtttggttttgggtttggaggaggtggggttgtagagttggtttgaatgagtgtaggggttgagtttggagtatttgggggtgtagtttgtaaatagggttggaggagagaggttgtgtaggaagagggttgtaggggagatgtggagagtttgggttttttggagggaggagatgtgttttgttaggtgggggtgttgggttaaggaaggggtgatgtgtgtagttttgggtggggagggggtttgggaggtgggagtattgggggtggggtgagaaggggaaggtgtttggtttatttggtgggtggggtggggggtggggtggtgggaaggaggaatgtttgtgggaggttgaatggggagagtttggtggtgtggggtgtgaaaggaggttttttggttggtgtggagatagtgagttggggttttagtagttgattgaggtagatatttagaggtagttaagagttgtggttgttgagatgttttggggatggtgggtttttggtttaggtgaggggttgttgagggggtgggttatgagttgtgagtgtgggggggtgtgttattatggggattgtggggtttaattgggtggggtggggttgtggggagttgaagtgttgggatttggttgggttttttggtaggtaggttgtatgtgtattgagatgaagatagaatattttgatgtatgtggaaatttgtgttgagtggaaaatattttattttatgaaatagtgtaatttttatggggtattattgggtttttagaggttttaattgggtgttggataaagatgtgtggatgtgagtgattttggggaagtttgttgggagttgtttttattttatgggtagttaagtgttttttttttttttttttttttgagagagagttttgtttaagtttaggttggagtgtaatggtgtgattttagtttattgtaatttttgtgttttggttttaagtgattttttagttttagttttttgagtagttgggattataggaatgtgtttttatattttgttaattttgtatttttagtagagatggggtttttttatgttggttaggttagttttggaatttttgattttaggtgatttatttgttttggttttaaagtgttgggattataggtgttagttattgtgtttggtttgtttagggttttttatttgggtagttggtgatattttgaaaagtttgtttttgttgtttgttagatatatatatatgtattttgagatagagttttgtttttttgtttaggttagagtgtagtggtgtgtttttggtttattataatttttgtttttggattaagagattattttgttttagttttttaagtagttgggattataggtgtgttttattatgtttggttaatttttgtatttttagtagagatgggttttattatgttggttaggttggtattgaatttttgattttttgattggtttgtattggtttattaaagtgttgggattataggtatgaattattgagtttggttgtttgttagatattaaatataaagtttaatggttgttatttgaataaatgaagaaataaaggtttagaaaaaataatttatttaagataagagttagtttgtgttttttgtttggttttgttttgaaatggagttttgttttgttgtttaggttggagtgttgtggtgtttttttggtttattgtaatttttgtttgttgggtttaagtgatttttttgttttagttttttgagtagttgggattatgggtgtgtttattgtggtttggttgattttttattatggagttttattatgttggttaggttggttttgaaattgttgattttaagtggtttatttattttagttttttaaagtgttgggattataggtgtgagttattgtgtttggttgttagttagtggttttgagtaatggattttaaatttatttaaatttagtttaaagtgttttaaaggaattttgagatttttttaagtgtaattatagtgttatttttgtttaagtgatttttttttgtagtttaaatatatatagttgtgtattagtagaatatgtttgtggggaatagagttagtatttgtaataataaatttttggttagaaaagtatgatgtattgtttatttgagtatgaattgattgttgaatttaaattaaatgggtgtatttattgtaaggatgtattttatatttatattgaatagtgtatgttatttgttttttgaggttgagtttaagagatttgtaaaaataaaatgtatatattttattttttgttatggagaggattttagggtatttaagaaagatgggtatttgatattaggtttttaaagaaattgtagtgtttagattattttgttgagtatagtattaggtattatggattttggatataattatgaataggataaagtaaagaggtaattgtagattttaagtggaaaggggatggagaggatgtgggttaggttaggtttttagttttgtaaattgaaattagaaggataaataagtttagatagattatagtgagagtgggaagttggtttaggaagaggaaggtttgtaaattgtgggtaggatgaaaggaggaggagggagtattggagaagttaagtagagatttaattatgaatagtttgatgagttatagagatatttggatttattttatgaattatttaagttttaaaatatgttgagtgtattttttttttttttgagatggaattttatttttgttgtttaagttggagtgtagtggtgtggttttagtttattgtaatttttgttttttgggttttagtgatttttttgttttatttttttaagtatttggtattataggtgtttgttattatgtttagttaatttttgtgtttatagtagagatgggttttattatgttggttaggttagttgtgaatttttgattttaggtgatttatttattttagttttttaaagtgttgggattataggtgtgaattattgtatttggttgtgagttattgtgtttgtttgagtattttttaatgtttgttatttagatttttttttgtgttgaagtgtttgttttttgttgtttttttttttttttttagttttttgttatttgtgtgtgatataaatgtttttttttataatgagtttttttatttagtttatggttttgttgttgttgttgaataatagaggttttattttgttgtttaggttggtgttgaatttttgtttttaagtgatttttttattttagttttttaatttgttgggattataagtgtgagttattatatttagttttatggtattttttgatgaataaattattgattataatgtggaatttgtttttttattttttttgtggttagtgtttttataggttttatttaagaaatttatagggaggttgggtgtagtggtttatgtttgtaaatttaatattttgggaggttaaggtaggttaatatggttagattttgtttttttaaaaaataagaaaattagttaggtatggtggtgtgtgtttgtagttttagttttttgggagattgagatgggaggattgtttgagtttaggaggttgaggttgtagtaagttaagagattatgttatgtattttagtttgggtggtagagttagattttgtttgttaaaaaataaaataaaagttggtgaaaatgttgattatatattttaggaataattagtaattgatattaaaattatgggttaaagagaaagtaaaaataatgtgattttaaattagaatttaaaagatttgtttagtgtatgtttagataaagttattatttattatattaaagttttaatatttattttgtgagttgttagtttttttttttaatatttttttttattgttttaaaaaattttaagaatattggatatttaagatttatttaaagttttaaaagtatttgtaaaattttaaaattataatttaaggtgtttttggagggtaggagtaatggtggtaggtagtgttttgttttgttgtttaggttgaagtatagtggtagattttggtttattgtatttttgatttatttggtttaagtgatttttttattttagttttttgagtagttgggattttaagtgtatattattttatgtttggttaatttttaaatttttttgtagaaataaggttttattgtgtagtttagatggttttgaatttttgggtttttaagagatttttttaaagtgttgggattataggtgtgagttattatatttggtttattttggtatttttgaaaattgtaggattattatggataaaattttaaaattatttttaaagaatttaggtttatatataaaaaaaatttggtttgttagtagtgagtgaagaaaaattttgagaaatgtttaaaatttttagttttgttatataatatattttattatttgtttaattattttttttgatttagaaattagttttttgggtttaggatgtttagtggtattttttttttttaagttttttagtattggaggaattgtatattagtaaaatttttagttttagtattttatagtttattgttatttttttttttttatttttttttttttttttttttttttttttttttttttgagatggagttttgttttgttatttaggttggagtgtagtggtatgattttggtttattgtaatttttgttttttaggtttaaatgatttttttgttttagttttttgagtagttgggattatagatgtttgttattatgtttagttaatttttatttttttagtagagatggggttttattatgttggttaggttagttttgaatttttgattttgtgattaatttgttttggttttttaaagtgttgggattataggtgtgagttattgtgtttagtttttttttttttttttttttttttttttttttttttgagatggagttttgttttgttatttaggttggagtgtagtggtatgatttgggtttattgtaatttttattttttgggtttaagggagttttttgttttagttttttgagtagttgggattataggtgtttgttattatgtttagttaatttttgtatttttttagtagagatggggttttgttatgttggttaggttggttttgaatttttgattttaggtgatttgtttgttttgtttttttaaaatgttgggattataggagtgagttattgtgtttggtttagtatattgttatttttttttttttttttttttttttttttttttttttgtttttttttttttttttttttttttgtgagatggagtttgttgtttaggttggaatgtagtggtgtttttttggtttattgtaatttttgttgtttgggtttaagtgatttttttgttttaggtttttaagtagttgggattataggtttttgttattgtatttggttaatttttgtatttttggtagagatggggttttattattttggttaggttggttttgaatttttgattttgtgatttatttgttttggttttttaaagtgttgggattatagatttgagttattgtatttggtttatattgttattttttaatagtagagaaattatgtgttagattttgtaagtgtaatggtatataaaggataaaatgatgttgaaaaataaaattttttgtttaaatgtttatgtttttaatattttattttagaaaggaatttattttaaaattgataatggttggatttagttttttatataaattttttttttttagtgaggatgtatatttattttgtaaataaatggaagatattatttttttaattgtttgtttagaaatgaaataatttttttttaatgattttttaaagtatgagattttatatattatttaaaataatttatattgtattttatatatgataaagttttaaggtaatagtttttttttaagattaaagttatagttttttttttgtatttgagggggattggttgtaggatttttttgtgaatatttaaatttttggatgtttaagttttttatgagatgtagtatttgtatataatttatatatatttttttttgtattttatttttagattatgtataatatttaatagaatgtaaatgttttgaaattagttgtttagttgtattttaaattttgtatttttttttttttttttttgagatagagttttgttttgttgtttaggttggagtatagtatagtgattatagtttattgtatttttaattttttaggtttaagttgttttgttttggtttttttaagtgttgggattataggtgtgagttattatatttggttattgttttttattggttttaaatttttgatttaaaatttttaatttaggttggttgaatttggattggaatttaaggatatgtttgttgagtatattgtatttattttggaatataattagaatgtttaatttgtatgttaaaaatattttatttggttaggtgtggtggtttatgtttgtaattttagtattttgagaggttaaggtgggtgaattatttgaggttaggagtttaagatgagtttggttaatatggtaaaattttgattttataaaaaaaaggtaaaaataagttaggtgtgatggtgtgtgtttgtagttttggttatttaggaggttgagatataagaattgtttgaattggggaggtatgttatgtttttagttgttgatttgagtttttttgtagtttgtagggggagggtaatagagtattaggtagtttttggaatatataggagtgtaattggaaaaagattttaagtaagtttaatgaattagataatttatttaattagtaaattatgtaattagtatgttttataataatattgtgagttagattttgtttttgatatgtatatattatattgtataggtgttattaatttggagagtatatatagtgagtttatgttttttttttgttattagtattatattaaaattttgttatggtttttaaattttgattttgagaaagttttttattttaataatataattatatttgtgtttgtttttatagttaaatatgtattatgatattagtttgtatatattttttaaatgatttgaatatttgattttaaaaattattttagaatttttgtgttttaatattaatgttagaagatttggaattgtttatttgtaggtaattgtttttaaggaaatttgattaaatattaattaagttatgtatttttttttggtaatagt

SEQ ID NO: 310 - DNA, 12781 bp, Artificial Sequence
  chemically treated genomic DNA (Homo sapiens)
attgttgttaaaaggaaatatataatttagttaatatttggttaagtttttttaaaggtagttatttataaataaataattttaagttttttggtattaatattgaagtatagaaattttagaataatttttaaagttagatatttaagttatttaaaaaatgtatgtaagttgatattataatgtatatttaattatgaagataaatataaatatagttatgttattagggtgagaaatttttttagaattaaagtttaaaaattatggtagaattttggtataatgttgatggtaggaaaaaggtatggatttattgtatatgttttttaaattagtagtatttatataatatggtatgtatatattagaaataggatttaatttataatattattataaagtatattgattatataatttattaattaggtaaattatttaatttattagatttgtttggaatttttttttagttatatttttatgtattttaaaagttatttaatattttattattttttttttataaattatggaaaaatttaagttaataattgagggtgtaatgtgtttttttggtttaagtgatttttgtgttttagttttttgaatagttaagattataggtatatgttattatatttggtttatttttattttttttttgtagagttagggttttgttatgttggttaggtttgttttaaatttttgattttaaatgatttatttgttttggttttttaaagtgttgggattataggtgtgagttattgtgtttggttaaataaagtatttttaatatataagttaagtattttagttgtattttaaagtaaatatagtatgtttaataaatatatttttgggttttagtttagatttaattaatttagattaaaaattttaaattaaaaatttaaaattaataaaaaatagtgattaggtatgatggtttatatttgtaattttaatatttggggaggttgaggtaggatagtttgagtttgggaggttaaaggtgtagtgagttgtgattattgtattgtattttagtttgggtaatagagtaagattttgttttaaaaaaaaaggaaaaaaaatataaaatttaaaatatagttgaataattaattttaaagtatttatattttattaggtattgtatgtaatttagagataaagtataggggaagatgtgtataggttatatgtaaatattatattttataagggatttggatatttaaggatttgggtatttataggggggttttgtaattaattttttttagatataaagggaggattgtaattttagttttagaaaagggttgttattttagaattttgttatgtgtaaaatatagtataaattgttttaaatgatgtatgaggttttatgttttaaaagattattagaaaagaattattttatttttaagtaagtaattaaaaaaataatgttttttatttgtttataggataaatgtgtatttttattaggaaaaaaaagtttgtgtgaaaagttggatttaattattattagttttgaaataaatttttttttgaaataaaatattagaaatataagtatttaaataaaaaattttgttttttaatattattttattttttatatattattatatttatagaatttgatatataatttttttgttgttaagaaatagtagtatgggttgggtgtggtggtttaggtttgtaattttagtattttgggaggttaaggtaggtggattatgaggttaggagtttaagattagtttggttaagatggtgaaattttgtttttattaaaaatataaaaattagttaagtgtagtggtagaggtttataattttagttatttgggagtttgaagtaggagaattatttgaatttgggtagtagaggttgtagtgagttaagaaaatgttattgtattttagtttggatgatagattttgttttataaaaaaaaaaaaaaaaaaaaaaaaataaaaaaaaaaaaaaggaagaagaaagaaagaaagaaatagtagtatgttgggttgggtgtagtggtttatttttataattttagtattttgggaggatgaggtaggtagattatttgaggttaggagtttaagattagtttggttaatatggtgaaattttatttttattaaaaaaatataaaaattagttgggtatggtggtaggtgtttgtaattttagttatttgggaggttgaagtaggagatttttttgaatttgggaggtggaggttgtagtgagtttagattatgttattatattttagtttgggtaatagagtaagattttgttttaaaaaaaaaaaaaaaaagaaaaagaaaaagaaaaaggttgggtatggtggtttatgtttgtaattttagtattttgaaaggttaaggtgggttgattatgaggttaggagtttgagattggtttggttaatatggtgaaattttatttttattaaaaaaataaaaattagttgggtatggtggtgggtatttgtaattttagttatttgggaggttgaagtaggagaattatttgaatttggaaggtagaggttgtagtaagttgagattgtgttattgtattttagtttgggtgatagggtgagattttattttaaaaaaaaaaaaaaaaaaaaaaaaaagaaagaaagaatgaaagaaaagaaatagtagtaagttataaaatgttaagattaaaaattttattaatatgtagtttttttaatgttaaaaagtttgaagaaaaagagtattattaaatattttggatttaggaaattggtttttgagttaaaaaagataattaaataggtagtaaaatgtattgtgtaataaaattaaaaattttaaatattttttaaaatttttttttatttattgttaataaattaaattttttttgtgtgtaaatttgaattttttaaaggtaattttaaaattttatttgtggtaattttgtggtttttaagaatgttaaaataggttaggtgtggtggtttatatttatgattttagtattttgggaggattttttaagagtttaggaatttgagattatttgggttatatagtgagattttgtttttataaaaaaatttaaaaattagttaggtatggggtggtgtgtatttggggttttagttatttagaaagttgaggtgggaggattatttgagttgaataggttgagggtgtagtgaattgagatttgttattgtattttagtttgggtaataaagtaaaatattgtttgttattattgtttttgttttttaaaaatattttaaattatgattttaggattttgtaagtgtttttaaagttttaagtgagttttaaatgtttggtatttttggggttttttaagatggtggggaaaaatgttaagaggaaaagttgatagtttataaaataaatgttaaaattttgatataataagtaatggttttgtttaaatatatgttaaatagattttttgaattttggtttaaaattatattatttttgttttttttttagtttataattttgatgttaattattagttgtttttaaaatatataattaatatttttattaatttttattttattttttggtagatagggtttgattttgttatttaggttggagtgtatggtatgattttttggtttattgtagttttaattttttggatttaagtgatttttttattttagttttttaagaagttgggattataggtatatgttattatgtttggttaatttttttattttttggagagatagggtttagttatgttggtttgttttggttttttaaagtgttgggtttataggtatgagttattgtatttagtttttttgtggattttttaaataaaatttatagaaatattaattatagagaaaataaaaggataaattttatattataattaataatttgtttattgaaagatgttataaggttgggtgtggtggtttatatttgtaattttaataggttgggaggttgaagtgggaggattgtttgagagtaagagtttaatattagtttgggtaataaagtgagatttttattatttaataataataataaagttataaattaaatgaaagaatttattgtgaaagaagatatttatattatatataaatgataaagaattaggaaaaaaaaaagaaatagtaaaagataaatattttagtataagaagaaatttaaatgataaatattaaaagatgtttggatagatatggtggtttatggttaggtgtggtggtttatgtttgtaattttaatattttgggaggttgaggtgggtggattatttgaggttaggagtttatgattggtttgattaatatggtgaaatttgtttttattataaatataaaaattagttgggtgtggtggtaggtatttgtaatattaggtatttgagaggatgaggtaggagaattgttggaatttaggaggtggaggttgtagtgagttgagattatattattgtattttagtttgggtaataagagtgaaattttgttttaaaaaaaaaaaaaatatgtttaatatgttttaaggtttaaatgatttatggagtaagtttgaatgtttttgtagtttattagattgtttatgattggatttttgtttaatttttttaatgttttttttttttttttttattttatttataatttgtagatttttttttttttgaattagttttttatttttattataatttgtttaagtttatttgtttttttggttttggtttatagagttgagagtttagtttgatttgtattttttttgttttttttttatttggagtttataattgtttttttgttttgttttgtttatggttgtatttaggatttataatgtttaatgttgtgtttggtagagtgatttagatattgtagtttttttagaaatttagtattaaatgtttattttttttgaatattttggaattttttttataatgggaggtgaaatgtatatgttttatttttataagttttttaaatttaattttaagaaataaataatatatgttatttaatatgaatgtaaagtatatttttataataaatatatttgtttggtttggatttaataattaatttatgtttaagtaaataatatgttatgtttttttaattaggagtttgttattgtggatgttggttttgttttttataagtatattttattaatgtataattatatatatttaaattgtgggaaagggttgtttaaataagggtaatattataattatatttagaaaaattttagaatttttttaggatattttaaattggatttaaatggatttgaaatttattatttaaaattattaattagtggttgggtatggtggtttatatttgtaattttagtattttgggaggttgaagtgggtggattatttgaggttagtagttttaagattagtttggttaatatggtgaaattttatggtgaaaaattagttggattgtggtgggtatatttgtaattttagttatttgggaagttgaggtaggagaattatttgaatttggtgggtagaggttgtagtgagttgagaaagtgttatagtattttagtttgggtgatagagtgagattttattttaaaataaaattaaataaaaaatatgaattggtttttattttgaatgagttattttttttgagtttttatttttttgtttgtttaaatagtgattattaaattttgtgtttagtatttgataaatggttgggtttggtggtttatgtttgtaattttagtattttggtaggttaatgtgggttgattaagaggttaggagtttgatattagtttggttaatatagtgaaatttgtttttattaaaaatataaaaattagttaggtgtggtggggtgtatttgtagttttagttatttgggaggttgaggtaggataattttttgatttagagatagaggttgtggtgagttaagaatgtgttattgtattttagtttggataaaagagtaagattttgttttaaaatatatatatatgtatttggtaaatagtaaaagtaagttttttaaaatgttgttagttgtttggataaaaagttttaaatagattgggtgtggtggttagtgtttgtaattttagtattttgaggttgaggtgggtggattatttgaggttgggaattttgagattagtttgattaatatggagaaattttgtttttattaaaaatataaaattggtggggtgtgggggtgtatttttgtaattttgattatttgggaggttgaagttggggaattgtttgaagttgggatgtggagattgtggtgagttgagattgtgttattgtattttagtttggatttgagtgaaatttttttttaaaaaggaaaaaaaaaaaaaagtatttaattgtttataaagtgaggataatttttgataggtttttttggagttatttatgtttatatatttttgtttagtgtttgattaaggtttttaaaagtttagtggtgttttataaaaattatattattttataaaataaaatattttttatttgatatgaatttttatatatgttaaaatattttatttttgttttggtgtatgtgtagtttatttattgaaggatttagttggattttagtattttggttttttatggttttgttttgtttaattaggttttgtggtttttatggtgatatatttttttgtgtttgtagtttgtggtttatttttttggtggttttttatttaggttgaaggtttattgtttttaaggtgttttggtgattgtggtttttaattatttttaagtgtttattttgattgattattggagttttaatttattatttttgtgttggttgaggaatttttttttgtattttatattattggattttttttgtttggttttttgtaggtattttttttttttgttattttgttttttgttttgtttattaagtgggttgggtgtttttttttttttgttttatttttagtgtttttattttttaggttttttttttatttggagttgtgtgtgttgttttttttttagtttagtatttttatttggtgggatgtgttttttttttttaaaaggtttgaattttttgtgttttttttgtagttttttttttgtatagttttttttttttgattttgtttataagttatatttttaaatgttttagatttgatttttgtatttatttaagttaattttgtggttttgttttttttgagtttagggttaggttgtgtatttttttaattttttgtgtgagtttttttttgttgggttttaagtgttttgttgttatgtttttgtttttgattttatttttattttgttatttggtgggggtagtaggtgttattgatttttgtagttttttgttgaggttttttgttttgggtggtgatgtggagtgtgttaagggtttgggtttaggtttagttttgttttaggttgtatttttgtttggggaaggagaggttttgggggtagtggtggtatggttgtttttgtgtgaggttttggttgaggttttgttggtattatttagtgttggagatttggggaagaagttgtatagggtgttttgttgtgatatattgatagttggtaaggtttaattgttttgttggatggagtttttaaaagtattgtatttattgtgtggtttttgttggtgggaaatttggggggaggtgtgttttgttggaggaatttgggttttagtggttaattaataggtgttttgttgtgtgtgggtggtgtgtgttaggttttgtttttgggtgtgtggtgatgtggggaagggtggggttggtatattggtgggtaggggtggggttggtatgttggtggtgaggggtttgttttgttgttgatgtttgggttttgtgtggggaattgttgagtttttttttttttatgttgtggggttggttgggttggaatattttgatttggggttagttgtggttgtggggttagtaggtttggaaagttttgtttttttggagtggaagtgggaatagtgggggtgtgtattgtttgggtggggataattggggggatttgaaaggttttggaaaggggtttgtggggagaaatgtgtttagtgtttgtgtgattttttgttgttagagtatttttgtaaggagatggagtgaaagggattaaattttagttagtagtttatttttatgttgtatttttaagatttgtatagagtaggtatttggtaaatgttaaatgaatattgtaatagtatttgttagtgatgttgttgtgtatggtgaaagtttgtagttgtataaagtttttttttgttaggtattgattttagtattttatatttggtaattaaattgatttttttaataatttgtgatgtaagtatttaagggttatagtttgttatttgagttttttgatttaggtgtgtttttataggattttttaaattttagaaagttaagagattatgagaggttgggtgtagtggtttatgtttgtaattttagtattttgggatgttgaggtgggtggattatttgaggttaggtgttgaagattagtttagttaatatggtgaaatttttgtttttattaaaaatttaaaaattagttgggtgtggtggtatgtgtttgtaattttagttatttgggaggttgaggtaggagaataatttgaatttgggaggtagtgtttgtagtgagttaaggttgtgttattgtattttagtttgggtgataagagtgaaattttgttttaaaaaaaaaagaaagaaagttaagaggttatgagaataaaaaggttttatttaaatttaagaaagatagtggaagatagataattgtttgtttttttatttagattgtgaaatttagattgttggaaattagttataattaatagttgtatattggtaaaaatttatgtaaaattagttgtttgttttgtttttggagattgttttgttagaaggtttttttttgttaggtaagtaataaaattaatttaaaaaaaaaaggtgggggttgggtgtagtggtttatgtttgtagttttagtatttggtattttggggggggggtggaggtgggtggattatgaggttaggagattgagattattttggttaatatagtgaaattttgtttttattaaaaatataaaaaattagtttggtgtggtagtatatgtttgtagttttagttattggggaggttgaggtaggagaatggtgtgaatttgggaggtggagtttgtagtgagttgagattgtgtttttgtattttagtttgggtgatagagtaagatttttttttaaaaaaaaaaaaagaatattgttaaaggtggtatgtgttaagaaaaatatagtatgttttatgaatttgtattttatttttgtgtaggggttattttaattttggtatatgtgttatttaagtaagtatagtgaaattaattgtttgagataatatttgagagttggttttttttttttattggtatatgtaaatatttttagagagtttgggggaatatgttgaaattaaatatgtagtaaaatttatatgtttatttatattaagtagaaagaatatagaatatagattataaatagttttaggttaaaatttgttattaaatgagtttatttttaaatttttggtttatagagttttttggattttagaattgtatgtaagaggttggttattttgtatttttatattatggatgaagttgaggtatagttgggttaagtaatttgtttatgattgtatagttaggaagtggtggagtttggatttaaatttaaggaagttggttttggagttttatgttgttaatagaaatattataatatttttaatttaatattattttattttatttagttattataattattttatattaggttgaattatgtgaaattgttaaaatttgttttttttaaaatttttttgagatagggtttggttttgttatagaggttggagtatagtggtgtgattttggtttattgtagttttaattttttaggtttaagtaatttttttattttagttttttgagtatttgggattataggtttgtaatattatgtttagttaattttttttttttttaattgaggagttttattttgttatttaggttggagtatagtgatgttattttggtttattgtaatttttgttttgtgggtttaggtaatttttatgttttagttttttgagtgttaggattattggtgtttattattatgtttagttaatttttgttttttagtagagatatggttttattatgttggtttgtttgattttaaatttttgattataagtgatttgtttgttttagttttttaaagtgttgggattataggtatgagttattgtgtttggtgttttgttagtattttaaaaattttttgtagagatgaagttttattatgttgtttaagttggatttttttggttttttggttgttttgttttgagatagggttttattttgttttttagattggtgtgtagtagtgtagttttagtttattataatttttattttttaagtttaagtaattttttttttttagttttttgaatagttgggattattggtatgtgttattattgtttagttaatttttgtatttttagtagagataggattttattatgttggttaggttggttttaaatttttgattttaaatgatttttttgttttggttttttaaaatgttgggattataggtgggagttattgtgtttagttaagttggattgtttttgaagtataaatattaatatttaatttattttggtttaattgaatataatgttattttttttttgttgttgttgtttgtttttttggggatggagttttgttttgttattgaggttggagtgtaatggtatgattttggtttattataatttttgttttttaggttaaggtaatttttttgttttagttttttgagtagttggggttataggtattaatatatttagttaagttttgtatttttagtagagatggggttttattatgttggttaggttggttttaaatttttgattttgtgatttgtttatttttgttttttaaagtgttgggattatagatgtgagttattgtgtttggttgatgttatttttttatagggaggaaatggaggtttagaggggatgtgttagttgtaagaggttaagagtttgggttttgggttaaatggagaattgagttttgattttagttagttaagtagataatttggagtaattaatatttttttgaatttgtttttttgtttttgataaggatagtagtatttatgggttaaattttggaggttatagttagatgttttttataaattttattaaaagataagagaatatatgtattatgtggggatatttagatttttagaattggtatgaatgttatttggaattgaagatatttgagagttaatagatgtagaaagatgttgttttaaagttttttttatgtgattaatagtagaaatttttgggagtgaagttgttgtaaattttttttttaggggagttttagtggttagaaaaaaagataaagattatttgtatttgtaaaaataaatatttttattttttttttgtttttttagaaatttatttgttttttttatggaaggtttttttttttttttttttttttattaaatggtatatataaagtagattttgagatttaagaaaaaaaaagttgtataaatgttaaataatagttttttggatttattttttttttttgtgaatttttgtatgtatatttgaataaaagtttgtttttttttttttttttttttgagatagggttttattttgttgtttaggttgattttttagttttagttttttaagtagttaagattgtaggtgtgtgtttttatattttgataattttattttttgtagagattgggttttgttatgttgtttaggttggtttttaatttttgggtttaagtttttttttttatttggttttttaaagtgttaggattataggtttgagttattgtgtttggttttaaattgtttttagtttgtagtgtttaattaatatatatattttatgattatatatgggttattttgaaaattgaataaaaatattttttttttatatgtattttttttttaaatggttatatttagtaaattgtataataattaatggagttgttttggtttaggagatgtggtaggaaagtattaaggtagtaaatatattaggtgtttgggaatttttggtttattggttaagagttttgtatttaaagtttgtgtttatattttagttgagttgtttattaaattgtatgagtttgttgggtaagttatttagtttgtgttttagtttttatatttgtaaaatagggatgatattaatattattttttttatgggttgtgttaagtattgagtgaaagggtattatgaagtttttagtttagtgtttggtatgttatatgtatttaataaattggatagttatataaataaattattaattggttagggatagtggtttatatttataattttaatattttgggaggttaagatagaaggatgatttgaggttaggagtttaagattagttagtaatatagtg

SEQ ID NO: 311 - DNA, 1631 bp, Artificial Sequence
  chemically treated genomic DNA (Homo sapiens)
ggatttagaatatggggtggatttaggtagtggtgggaattaggtggatttgtttggattgaagtttttgttaggtattgaagttgtgaagttgtttgtgtagtaaagggagtttttggggggtgtttgagattttggtgttgtttgggggttgttggtagttgtgtttgttgttttttgtttggtgatttagttggtatttttggtggggttatgggggttagaggatagtgtggggggtggtgagtgtggttgttaagttttttaaggttttggagggataggatttgggtgtattttattggttgttatggtaatgtagtgttttagttttttgtgttttgtggtggagggaggtgtagttaattggaagtggtggagtttttggggatttttttttttttgttttatgttgtgtgtgggtgggggttaggaggtgtggggtggaggtggagtgtgggttgtggagatttggtgtttgtaggaggtttggtgtgtggtggggttgtatggggttatttttggagtagtattgtgagtagtggtgtgatagtgtggggtttttttttttttagaagagatgttatttatataaatttgatttttatgtggggtgtgggattttgtggggttttagttgtaggtgtttttgttgttttttttgggtgggtgggttggagaagaagtttatgtgggattttttaaaatggtgtatagggggattttagggttttatggttatttttttggattttttggaggtgttgtttagttatttttagttgttttgatgatttgttgtgggtttttttaggagatttgaaagtttagggtgggttgtgtgggtaatatttttgtttaggtttttggagggttttatgtggttgtttttggagtattttagagtgttagggttgtgggaaggggtgggtgtgtttttggaaatatgagtgtttgttagtattagtgtttggatagggttggggataaattagtttatgttgtgtatattgaatttatgtgtttgagtgagggtgggtgtgttggggagtgtgtttaagtggatagtgttgtatagtaatgtttatggggagttttaggagagtttggttatttttgtgtaggataattttttttttattatttgagttttgtgtttgtgggtaggatttttttgaattggggttgtgtgtttagaaatatgtatatgggagtgtttagtttaaagttttagggtttttgggatttgtgtgtttggggttggggttttaggtgggtataggtgggagggtgaatttgtgggtagggtgggtttttttttgtgggtttagtatttgtgtgtttttagtttaggtgtgtgggaggaaggtagtggtttgttgtgtagagttttgtgtgtttgtgaggtggtgttatagttgtagtagtgtttgttggtttgggttgttttagataagagtgtgtggaaagtgtggtggggttgagatgtgattaggatgtggggaggatggattagtaggatagattgattgggggtttggtgggtggagggtagtgtagttatgttttttttggatttgttgttagttgggtttggggtttttgatatgttttttaggtgggtttttgag

SEQ ID NO: 312 - DNA, 1631 bp, Artificial Sequence
  chemically treated genomic DNA (Homo sapiens)
tttgaggatttatttggggggtatgttgaaagttttgggtttggttgatggtggatttaggggggatgtggttgtgttgttttttgtttgttgggtttttggttggtttgttttgttggtttgttttttttgtgttttggttgtgttttagttttgttgtgttttttgtatatttttatttggagtggtttgggttggtgggtgttgttgtggttatggtgttattttgtgggtgtgtagggttttgtgtggtaggttgttgttttttttttgtgtatttgagttggaggtgtatagatgttgagtttgtggggaggggtttattttatttgtaggtttgtttttttatttgtatttatttgggattttgattttggatatgtgagttttagaaattttggggttttgagttgagtgtttttatgtatgtatttttaggtatatagttttagtttggaaaagttttgtttgtgagtatgggatttgggtggtgggggagaggttattttgtgtaggagtagttgagtttttttggaattttttgtagatattattgtatggtattgtttatttggatgtattttttaatatatttatttttatttaggtgtatggatttggtgtgtgtggtataaattgatttgtttttagttttatttaggtattgatattaataggtgtttatgtttttagaagtatatttgtttttttttgtagttttagtgttttgggatattttaggggtagttatgtagggttttttgggaatttgggtagaggtgttatttatatagtttgttttgaatttttgggttttttaaaggaatttatgatgagttattagggtgattggaagtggttggatagtgtttttggggggtttaaagaagtaattatggggttttagaatttttttgtatgttgttttgaagaattttgtgtggattttttttttaatttatttgtttgaaggaaataataggggtgtttgtggttgggattttgtaaggttttgtgttttatgtgaaggttaggtttgtgtgggtgatgttttttttgggagaaaggggattttgtattgttgtgttgttgtttgtagtattattttggaagtggttttgtgtagttttgttgtgtattaagttttttgtgaatgttggatttttgtggtttatgttttgtttttgttttgtattttttgatttttgtttatatatggtgtggagtgggggggggggggtttttgagaattttgttgtttttgattggttgtgtttttttttattgtggagtgtgaggggttggggtgttgtgttattatggtaattggtgaggtgtgtttagattttgtttttttgaggttttggagagtttagtaattgtgtttgttgttttttgtgttgttttttggtttttatggttttgttagaggtattggttgagttattgggtgaggggtagtgggtgtggttattagtggtttttgagtgatattaaggttttgggtgttttttggaggttttttttgttgtgtaggtgattttatggttttggtgtttggtggaggttttggtttaaatgagtttgtttgatttttgttgttgtttgagtttgttttatgttttggattt

SEQ ID NO: 313 - DNA, 9254 bp, Artificial Sequence
  chemically treated genomic DNA (Homo sapiens)
tgggggaaattgattttatgatttaattatttttatttgattttatttttgatatgtgaggattattataatttaaggtgagatttgagtggggatataattaaattatatgagtggatatgtaatatgagtgagaaataattttgtgattgtaatttagtaagatttttggatggttaatatagtataatttagagtatatggaggtgtgtatttttagttttttgatttttgggtatttagtaggattgtatttttttgtattttttaagtaaggtatggttatgtgattaattttagttaataatatgtaaatataataaaaagtgttatttttaggagggagtttttaaagttaatgtgagtttattatgtttttttttttttgttaaattgatgtgatgattgttgaagtatgtattaagatgaaattttttttagattaggtttttaaatgagtatattaagtagagttttgtgaagttgaatatgtagtatgagtaaaatataaaatttatttttaagttattgaaattttaggattgtttgttatggtagtataatttaaattattttgatttatataaaaattggtttttagatatgggttagtgtaataataataataagtataataataataaaattaaataattatttagagggtgataattaagaatattgttattagaagttgaagggatggtgatttgtttggtaaatatattatttgtgataatgtagaaggtagattatgaatttgatgaattaaagaaaaggattgtaaaatagagagtgagtagtgtgtgttggtggttgttggatgtattttgaaagttattataagttatttaaagatgaatttagaaaaatttggtttgtttgtaattaggaatgaaatggaatagagaaaatttataaatttagggatttatattgttagaagaggtaattgttttttagttttgattggtaaaatataaaattaagaaatatttttagtaagaaaggatttggaagaaattaagttttgaagtaaggattaagttataaagtatgaatttattattaaaattttaggataggaggttgaggaggatggattatttgaggttgggagtttgagataagtttgattaatatggagaaattttgttgtttttaaaaatataaaattagttgggtgtggtggtgtatgtttgtaattttagttatttaggaggttgaggtaggagaattgtttgaatttgggaggtagaggttgtagtgagttgagattgtgttattgtattttaattagggtaataagagtgaaattttgttttagaaaaaaaaaaaaaaggattaattaagattttatttagtatatatttttaattggataaaatggttttgggaaaaggaagaaaggtttaatttttttattaaaatttaataagtttaaagtgtttaaaattaagtgaagagtaagagagtgagatggtaaaagagagatagaggagttaataggtaggagagtaggaaagtaaagagatatggtaaattaaagaagtatgtttggaaaagaattttgtggttattgttatatggaatattttatattagatagataagaagtttatttatatatatttaagatttaatgttattttgtatttttttaatttttaaaagtttatttaaaagtatattttttaatgtttgttttagttgtggaaaaggaagattttttgagggtaaatttaggagttatggaaaataatgggtagggtagtttggtgttgtgattggatgggtttttaaggttgttttttttgaataaagaatgagggaattttattaggggaaggagagtagattaaatatttggtgaatagaaagggagatagagtttttagtgttattttttaaatatttttggagagttttttgagatatttggtaggattatagtgatttaaagaggtatggttatgtgattgttttggttaatgatgtatgggtagaagtgatgtgtgttataagtggatgttttgatagttatgatgttttgagttttttttttatagttaggatagttgtgaaaaggggtattaatatgaggttttttttagtttgagttttttagtgattataatgagtagagttattttgttaatttataatggttatgtagtagaaatgattaatttttattggaataagttattgatatgttagggttgtttgttagggtagtataatattgttttttttgatagaattgggagtgagagataaggttggagagagaaggagttggattgtgaaaagttttttttttaaggtataggaattggaatttttttgattgtaaggaaaagttaatgaaggtttttaagtaggggtgttaatatgaatagatttgttatttttttggatgaaatatgttattttttaatataaggagaagattagtttattaaattatatgaggtagagaggaatatatagaattttaggtaaaagatatatatttatgtaaagttttaagttttgaaatttttaaatataagagttttgaatggagttatagttagaggattaggtaagaaaattttttttatgttataagtgttattttttttgtagataattaatattttataagaaagtttgttagagtagagaaaatataaaggaatgtaatatagatttgaggttaatttttagttgtttgtgtgattttaataaagatatttaatttttttgggtttatttttttatatgttaaatttggataataatatatgttttttaagatagttgtggggagaaaatagtgtatttaaattgtttaggagaatgtttggtagataataagtgtttaatatatgaaattgatttttattattgttattaaaaaatatttagaatattaattttttgaatataatagaaaatgatttagggtaatagatagaggagaatgttttttttttgaggaagtaattggattttgttattattgtatatttatttattttattttttttttagtttagtgtttggtttatagtaggtttttagttattttttgtagattagtgaaagttaggtgagtgtttggagtgaagaaaagttggtaggttttttattgatattagttgttgttggtttttgaatatttaaagttgtaaatattttagggttgggggtaatgaatttaaggttgaattttaagtttagaagtagtgaagtttgaatttagaatttaggaatttaaattgttgtaggtttaattttaagttttagttttagatagaggtttgggaaagatttgatttttaatttggttttttttttttttttttttttgatgttttttataggaaagtatatttggttttgttaaattgtatttttatattttggtattttatttaggttttgtgaggatggaaattgtgaggtaggggagggaagtgggttgtttggttattatttttttagtgttgtaggtgattttgttatattaatttttggtagtttagtgaggtggatggtattggttttatttgtagatgagggaaatgaagtttggaggagttttgtgatttgtttgttttatattgtggtagtttggttatgaaagaattaggatttttgattttgggattttttttattatatatttttgtttttaaggggtggggggtggggggagaataaaataattgtggaaaaggaattatttatatgtgtttagtgttttttagaggttatttaggatatgtgtttattatttggttgggagtgtagagatttgaagtttaggttttattttgggttttgagtattattgtgtgattttatgtgagtgtttgttgttttttgggtttgtttttttggaagtaatttggtgtggatggagtgtgtgtgtgtgtgtgtgtgtgtgttatgttgtgtgtgttgtgttaagtgtgtgtgtgttgtttgggggtgggagggggagtagattaatattggggttttttgagttttggattgtttatatgtttgtttttatttggattttgttatttattaattgtgtttattataaaaattgtttttttgaggtaaagttgtgaatttttgtgtttttttttttatggttttggaggatgaagtggggtgtaatggagatttagttgagtgtttagttttgggtaatataaattttttggtttttatgagtagttagatgattttgtggattgttgtttttgaatttgattgagatgtaaattttggagtgtttttaatgtggggggttgatttttgggagattgtttttaaatttaagtttttttaggtttgtttttatttgggattttatagagttattttaagggtggtatttttgtttttttggaagtgtgggggggtggtagtgtatttggatttttagtttttagttttgtgtggtggtggttgttggtggatgattttgggttttataagtggggaaataataattattttttgtttgtatttttggtttaaaataattggttaggttttttggttttttgggtttttgtattttttgtatttttgtttgtagttgtgaatttgagtttttttttattagaggttgtgagtgtttgtttgtttgtggtagttattgttattagatagttaaattttaagatgttagtttataatgtattgggtgggttgggaaaaatggtttggggaggggattggggaagagagggttgagaggtgtgtggtaggggggagggtaggagaaagaagggtttgattgtaggagggtagtggagtattattttattttgtgagtttttgtgggtttagagaagaattttttagggtggagtttttatggtgatgggtgggtttgtttttttgagagtgatgtgagttaatgggaaggttttggggtgatattatgggttatttttaggggttgattggtagtagataagtgttgagtttgggttggataagggtttagagttgtattgagtgtggttgaagtagtgaggtgggagtggaggtgtgtggagttaggtagatagatagatatagttagttagttaggttggtagtatagtttgaattgtaaattttattttttttttattttttttttaattgtttagagttagtgtttgtggtttttgggttggtgttttgggagtgtttagagagtttggtttttagttgtttttgggaggagagttttgttgtttaggtgttgttgatagtggtggaaagtagtggtatttatgtgtttgttgggggaagttggtgagtggttgtagtagtaaagaatttttttggttgggaggattggagataagtggtagagttttggagttaatttttgtaagttttttttgtgttttaggtttttttatggtggtaaagattagaaggtggtggagagttatgtaagagaagaaggatgtgtgtttagttttgtttgtattggttgttgaatttgggtgagtgtgagttgtggttgttgggtgttttttttttttagtagtggaggaggggataagttgttggagtttgggtggttaagatttgttgttggttggttattgtagggtttgtattgatttgttttgtggggagagttgttgttttgggaagtgagtttgtttgtggattttgaggaattgttgtgtatgaagagtgtttagtgagtgattgtgattttttaaagttgggtagtgtgtgtgagttgataagtaagagtgtgggaggtattttaattaattttgtgttttttggagtgagttggtgaggagggtgtagtggggatgatagttagtgggtgtgtgtgtttttagagaaattttttttgttaaaggttttggggggtgtgggtgttttttgtttgttatagttttgttgtggttttgaaatttgtgtgtgtagtttaaattaattttatgtgaagtgatggattgttttatgattgtaaagatggaaatgattttttatgatgatgtttttaatgttttgttttttttgtttgagagtggattttatggttatagtaattttaagattttgaaatagagtatgattttgaatttggttgatttagtggggagtttgaagttgtatttttgtgttaagaatttggatttttttattttgtttgatgtggggttgtttaagttggtgttgtttgagttggagtgtttgataatttagtttagtaatgggtatattattattatgttgatttttatttagtttttgtgttttaagaatgtgatagatgagtaggagggttttgttgagggttttgtgtgtgttttggttgaattgtatagttagaatatgttgtttagtgttatgttggtggtgtagttggttaatggggtaggtatggtggtttttgtggtagttttggtggtagggggtagtggtagtggtggttttagtgttagtttgtatagtgagttgttggtttatgtaaattttagtaattttaatttaggtgtgttgagtagtggtggtggggtgtttttttatggtgtggttggtttggttttttttgtgtaattttagtagtagtagtagttgttgtattatttgttttagtagatgtttgtgtagtatttgtggttgtaggttttgaaggaggagttttagatagtgtttgagatgtttggtgagatattgtttttgttttttattgatatggagttttaggagtggattaaggtggagaggaagtgtatgaggaattgtattgttgtttttaagtgttgaaaaaggaagttggagagaattgtttggttggaggaaaaagtgaaaattttgaaagtttagaatttggagttggtgtttatggttaatatgtttagggaataggtggtatagtttaaatagaaagttatgaattatgttaatagtgggtgttaatttatgttaatgtagtagttgtaaatattttgaagagagattgttgggggttgaggggtaatgaagaaaaaaaataatatagagagatagatttgagaatttgataagttgtgatggagagaaaaaagaagtgtttgagaattaaagttaagggtatttaagttggattgggttgtgttttgatggtgtttttagtgtgtatgagtgggaaggatttggtgtgtttttttttggtgtggagttagggagtggttgtttgtgggttgttttgttttgtggatgggttgtttttgtgtgaatggaatgttggattttttgttaatattgattaagaattgtatggatttaatatttgattttatttagtattaaaggggggagggggagggggttataaattgtaatagagattgtagattgtttttgtagtattttttaagaatataaagtggggggagggttggggaggggtggtaggagggaggtttgtgagagtgaggttgagtttatagatgaattttttttggtttgtttttgttaattgtgtatgtatatatatatattttttaatttgatgaaagttgattattgttaataaatagttttatgtttttgtaagttattttttgtttgtttgtttgggtattttgtttagtgttgtttgtaaataagagatttggagtattttgagtttattatttgtaataaagtatataatttttttatgttttgtttttgaaaattttagaaaggatatttaagaaaatataataaattattggaaagtatttttttaattttttttttgtattatttgtagatattagttatttaggtggagttgaaagagttaagaatgttgattaaaattatttttagtgttttttattattaagtagtaaaaattgttttttattagattttagaaataaatgtatttgatgtatttgatgttatggttaggttatatttttttttttttagttatttatatggaattgtttattaaaggatagtgtgatgttttaggaggttggaggaaggggggttgtagtggagagggatagtttattgagaagttaaatattttaaagtttggattgtattaagtggtatgtgttgtgattatttataatgttagtagaaattttataataggtgtttatttttaaagtaggaattggtggtagattttataaaagatgtatttttttaatttggaattttttttttgataatttttagataaaaagatggtttttgtttatgaatatttataatagtatttttgttataataaatgtatttaaatattaataatagattttgaattgtttttttttattatttttttttttttaagttatatattgaagtttttatttttagttgttgaggttaatattgttgtaatttgaagtgatttgaaaattaagaagtaaagaatttaggaagagttaaattagaagttgtgatttgaatgaaatagttttttaattttattaattttttttttttttttttatttttatttttttttttattattttatttttaaataaatttttatgtttatggaaattaatagtttagtattttgggtttgtttgtagtttattttttaatttgtttttaaaataattaattttgtttaaatatagaataagttttaaaagatagtaatttaatattatggaaaagatttataagagaaaatatgaattagtattaatttaatgattatatgtgtaaattaaattttagttttggggaaatgggaaatttgaattttatttatagatataatttaggagattaataaggtagtgtttaataagggaataattttttgtttggttgttttttatattaagagttagtgtgattattaggtagtaaaagtaatttgatatttaggaatattttataaattattaattgagttagggttgtttgtttattagtagtgttttagtatttagtaggtttgggagtgttaatattttgtttgtggttgtaaatttaaatatataaagagtttttttttaggagtatatttaggagtggaagagattggataggtttgttagttttggattttttgtaataatattttttgaataaagggttattgggagtagagtttagtttgttaaattgaatttgttgatgttagtaatttggaaggtgagatgattttgattatatgtagaaatagtagagggataataaagtattttggggtggggttttgtggaagttaaataagagttaattagaaaaaataagtaggttggggaattaattatttgtaaagg

SEQ ID NO: 314 - DNA, 9254 bp, Artificial Sequence
  chemically treated genomic DNA (Homo sapiens)
tttttgtaggtaattaattttttagtttgtttattttttttagttggtttttgtttagtttttatagagttttattttaaaatgttttattgtttttttgttatttttatatatggttaaaattattttattttttgggttgttgatattggtaaatttagtttggtaaattgggttttgtttttagtaattttttgtttaagaagtgttattataaaggatttgaagttaataagtttgtttaattttttttatttttagatatatttttaaggagaaattttttgtgtatttggatttatagttataggtaggatattagtatttttagatttattgggtattagaatattgttaatgagtaaatagttttgatttaattagtggtttgtgaaatatttttggatattaaattgtttttgttgtttgataattatattggtttttggtatgaaaagtaattaagtaaaaaattgtttttttgttaagtattgttttgttgattttttaagttatatttgtaggtagaatttaagttttttatttttttagagttgaggtttgatttatgtatgtaattattgagttagtattagtttatgtttttttttgtgaattttttttatagtattagattattattttttgagatttattttatatttaaataaggttgattattttagaaataaattaagaaataagttatagatagatttaaaatgttaaattgttagtttttataggtataggggtttatttgggggtgaggtagtagagagagagatagagatggagaaagagggaaagaattaatgaaattgggagattgttttatttagattataatttttagtttgattttttttaaattttttgttttttaatttttaaattattttagattgtagtaatgttaattttagtaattaaaaataaaaattttagtatataatttgggaagaaaaaagtagtaaagggaagtaatttaagatttgttattggtatttgaatatatttattgtgataagaatgttgttataaatatttataagtaaaggttatttttttatttaggaattgttaaagagaagattttaaattggaaggatatattttttgtaaaatttgttattaatttttgttttgagaataagtatttattgtaaaatttttattaatattataaatggttatagtatatgttatttgatataatttaaattttgaaatgtttgattttttagtgggttgtttttttttattgtaatttttttttttttagttttttgaaatattgtattattttttggtaagtaattttatatagatagttgggggaggaggagtataatttgattatagtattaggtatattaggtatatttatttttaaagtttaatagagaatagtttttattgtttaatagtaagaagtattgagagtgattttaattgatatttttaatttttttaattttatttagatagttagtatttatagatgatgtagaaaagaggttaggggagtattttttaatagtttattgtatttttttaaatattttttttggaatttttagaaataaaatataaaaaaattatatattttattataaatggtaaatttagagtgttttaaattttttatttataaataatattgggtaggatatttaaataaataaataagaaataatttataaaggtatgaagttgtttattgatagtaattagtttttattaaattaaaaaatatatatatgtatatatatagttaatgaaggtaggttagaaagagtttatttgtaggtttagttttgtttttataaattttttttttgttgtttttttttaattttttttttgttttgtgtttttaaggagtattatagaagtaatttatagtttttattgtagtttgtaatttttttttttttttttttttaatattgaatgagattgaatgttaggtttatgtagtttttggttaatgttaatgaaaagtttaatgttttgtttgtgtggggatagtttgtttgtaaagtggggtagtttgtaggtggttgttttttggttttatgttaagggagggtgtgttaagttttttttatttgtgtatattgggggtgttgttaggatgtaatttagtttaatttggatatttttggttttagtttttggatattttttttttttttttgttgtaatttgttaagtttttaagtttgtttttttgtgttattttttttttttgttgttttttagtttttgatggtttttttttaaaatgtttgtaattgttgtgttagtatgagttggtatttattgttaatgtggtttatgattttttgtttaagttgtgttatttgttttttgagtatgttggttgtggatgttagttttgagttttgagtttttaaggtttttatttttttttttagttgggtgattttttttagtttttttttttggtatttggaggtagtgatgtggttttttatgtgttttttttttgttttgatttgtttttgggattttatgttgatgggggataggggtggtgttttgttgggtattttgggtattgtttgaggttttttttttagggtttgtagttgtgggtgttgtatgggtatttgttggggtaggtggtgtggtggttgttgttgttgttggggttgtgtgggaaaggttaggttggttgtgttgtaggagggtgttttgttgttgttgtttagtgtgtttgggttgaagttgttgaggtttgtgtagattggtggtttgttgtgtaggttggtgttgaagttgttgttgttgttgttttttgttattgaggttattgtgggagttattatgtttgttttgttgattggttgtgttgttgatgtgatgttgggtagtgtgttttggttgtgtagtttggttagggtgtgtatgaagtttttggtgaagtttttttgtttatttgttatgtttttggggtataggaattgggtgggggttggtgtggtggtgatgtgtttgttgttggattggattattaggtgttttagtttgggtgatgttagtttgagtagttttatgttgggtgaggtgaggaggtttgagtttttggtgtggaggtgtggttttaggttttttattgggttggttaggtttagggttatgttttgttttaggattttggggttattgtagttataaggtttgtttttggatgggaggaatgaggtgttgagggtattgttatagaaggttgtttttatttttgtagttatagaatagtttgttattttatgtgaggttagtttgggttgtgtgtataagttttggggttgtaatagggttgtggtaagtgggggatatttgtgttttttggagtttttgatagggaaagtttttttaagagtgtatgtatttgttggttgttgtttttgttgtgttttttttattagtttgttttagggagtgtagggttaattaagatgttttttgtatttttatttgttgatttgtgtgtgttatttggttttgaaaagttgtggttatttattgagtgttttttgtgtgtagtggttttttggagtttgtaggtgaatttattttttagagtagtggttttttttgtggagtggattagtgtggattttgtagtggttggttggtggtgggttttggttgtttggattttgatgatttgtttttttttttgttgttagggggagggggtgtttggtagttgtggtttgtgtttgtttaagtttaataattggtgtgagtgaagttgagtgtatgtttttttttttttgtgtggttttttgttgttttttggtttttattgttgtggagaagtttaagatgtaggaaaggtttgtaaaagttggttttgggattttgttatttgtttttggtttttttagttgggaaagttttttgttgttgtagttgtttgttgattttttttggtgggtgtgtgggtattgttgttttttgttgttgttaatagtgtttgggtagtagggttttttttttgggggtggttggagattaggttttttggatatttttgaaatattagtttgggagttataggtgttagttttgggtagttagagagaaggtgaaaagaaaataagatttgtagtttggattatattgttgatttggttggttggttgtgtttgtttgtttgtttgattttgtgtatttttatttttgttttgttgttttagttatatttagtgtaattttgagtttttatttagtttgagtttaatatttatttgttattagttaatttttaaaaatagtttatgatgttattttaaggtttttttattggtttgtgttgtttttaggggggtgggtttgtttgttattatggagattttattttagaagatttttttttgggtttgtggaggtttatgggatgaggtaatgttttgttgtttttttatagttgggttttttttttttttatttttttttttgttgtatgttttttggtttttttttttttggttttttttttgggttgttttttttggtttgtttggtgtattgtgggttgatgttttggggtttgattgtttagtgatggtggttgttgtgagtgggtggatgtttgtaatttttgatggaggggggtttaagtttatggttgtggatggggatgtgggggatgtagggatttgggaggttagggaatttggttagttgttttgggttaggggtgtgggtgaggggtggttgttgtttttttatttgtggggtttgaagttatttattggtggttgttattgtgtggggttggaggttgagaatttaagtatgttgttatttttttgtatttttgggggggtgggaatattgtttttaaggtggttttgtgaagttttaggtgggggtgagtttaaggggatttaagtttaggggtggttttttgagagttggttttttatgttgagaatattttgaagtttgtattttggttaagtttaggagtgatggtttgtggggttgtttggttgtttgtagaagttgagagatttgtattgtttgaaattggatgtttagttgagtttttgttgtattttattttattttttgggattgtgggggaaagggtgtgggggtttatagttttgttttggaggggtagtttttatagtgggtgtaattggtgggtaatagggtttagatgggaataagtgtgtaggtgatttgaaatttggggaattttggtgttagtttatttttttttttgtttttggataatatgtatatgtttaatataatatgtataatataatgtgtgtgtgtgtgtatatatatattttatttgtgttgagttgtttttgggaaaataagtttagaaggtggtggatatttgtataaagttatgtagtagtatttggagtttggggtagaatttggattttaaatttttgtatttttggttgggtggtgggtgtatattttgggtagtttttaggaagtgttagatatatgtaagtggttttttttttgtggttattttattttttttttgttttttattttttagggatgaaagtgtgtggtggaaagaattttgaagttgggaattttggtttttttgtggttaggttattatagtgtgaagtaagtaaattatggaatttttttgagttttattttttttatttgtaggtggggttggtgttgtttattttattgggttgttaggagttagtgtgatagggttgtttgtagtattagggaggtggtggttaaatagtttgttttttttttttgttttgtagtttttatttttgtagagtttggataggatgttaggatataagagtgtgatttggtaggattaggtgtatttttttgtgagaagtattgaggggaggaggggagggggaattgggttagaagttagattttttttaagtttttgtttaaaattggggtttgaagttggatttgtagtagtttaagtttttaggttttaaatttagattttgttgtttttgaatttggaatttagttttgggtttattgtttttagttttaaggtatttgtggttttgagtgtttagaaattaatagtagttggtattagtgggaaatttgttaatttttttttattttgggtatttatttagtttttattgatttgtagagggtaattgaaagtttattgtgagttaggtattgagttggggagggggtggggtaggtaggtatatagtgatgataagatttagttgtttttttaaggagagaatatttttttttgtttgttgttttgaattattttttgttgtatttagggagttggtgttttaaatattttttaataatagtaataaaaattagttttatgtattaaatatttattatttgttaggtatttttttaagtaatttaaatatgttgttttttttttataattgttttgagagatatatattattatttagatttaatatgtgaggaaataggtttagagaggttaagtatttttgttgaggttatataggtagttggaaattgattttaggtttgtgttatatttttttgtattttttttattttggtaaatttttttgtggagtattagttatttgtagaggaaatagtgtttgtggtatagaagaaatttttttgtttgattttttgattgtaattttgtttagagtttttgtatttagaaattttaagatttaggattttgtataaatatatattttttgtttaaggttttgtgtgtttttttttgttttatgtggtttagtaggttgattttttttttatgttgagaaatagtatattttatttaaaaaaataataaatttgtttatgttaatgtttttgtttggaagtttttattggtttttttttataattaggagagttttgatttttatgttttggagaaggggttttttataatttaattttttttttttttagttttattttttatttttagttttgttaggaaaggtagtgttatgttgttttaataaataattttaatatattagtggtttattttagtgaaagttggttatttttgttatatgattgttgtaggttggtagggtagttttgtttattgtagttattaaagggtttaggttgaaggaggttttgtgttgatatttttttttatagttattttgattgtggggaaggaatttggaatattatggttgttagagtatttatttatggtatatattatttttgtttatatattattggttaaagtagttatatggttatgtttttttagattattataattttattaggtgttttaaagggttttttaggaatatttggggaataatattaaagattttgtttttttttttgtttattaaatgtttggtttatttttttttttttggtggaatttttttattttttatttaagggaaataattttaaagatttatttagttatagtattaagttgttttgtttattgttttttatgatttttggatttgtttttggagagttttttttttttatagttaaagtaggtattggaaaatatgtttttaaataagtttttaaaagttggggagatgtagagtgatattaagttttgaatatgtgtaggtaggttttttatttatttgatatgaggtgttttatgtgataatagttataaagtttttttttagatatatttttttggtttgttatatttttttgtttttttgtttttttgtttgttgatttttttgttttttttttgttgttttatttttttgttttttatttgattttgagtattttgggtttattgggttttgatgggagagttagatttttttttttttttttagagttattttgtttagttgaaagtatatattgggtaagattttaattgatttttttttttttttttttgagatggagttttatttttgttgttttggttggagtgtaatggtatagttttggtttattgtaatttttattttttgggtttaagtgatttttttgttttagttttttgagtagttgggattataggtatgtgttattatgtttggttaattttgtatttttaggagtgataggatttttttatattggttaggtttgttttgaatttttgattttaggtgatttgttttttttggttttttattttgaggttttaatagtaggtttatattttgtgatttgatttttattttaaagtttagttttttttaggtttttttttgttaaaagtattttttgattttatattttattagttgggattgggaaataattgttttttttaatgatgtaaatttttggatttataggttttttttattttattttatttttgattgtaaataggttaaatttttttgagtttatttttgaatagtttgtagtaatttttagaatgtatttaatagttattaatatatattatttattttttgttttataatttttttttttagtttattaggtttatgatttgttttttatattattataggtgatatgtttattaaatagattattatttttttagtttttgatagtagtgtttttagttattgttttttaaatgattgtttagttttattgttgttatgtttattgttgttattatattaatttatatttaggagttaatttttatatgagttaggatggtttaggttatgttgttataataaataattttaaaattttagtggtttaaaaataaattttatattttgtttatattatatgtttaattttatggggttttgtttaatgtgtttatttagaaatttagtttgaagaaggttttattttgatatatgttttaataattattgtattagtttggtaggggaaagaaagtatggtgaatttatattggttttaaaagtttttttttaggaatgatattttttattgtatttatatattattggttaaaattagttatatggttatgttttatttaaagggtgtaggaaagtgtaattttattaggtatttggaagttaaagagttggaaatgtatatttttatatattttaggttatgttgtgttagttatttaaaaattttattgggttataattatagaattgttttttatttatattgtatgtttatttatatggtttggttgtgtttttatttaaattttattttgaattgtaataatttttatatgttaaaggtggggttaggtggagataattgaattatggggttagtttttttta

SEQ ID NO: 315 - DNA, 8244 bp, Artificial Sequence
  chemically treated genomic DNA (Homo sapiens)
ttttaaatatatttattattttgatgggttataataatttttttggatgttaatttttggggatgttaaaatatattagttttggtgggtttttttagatttatattatgtggtttggggttttagatgtgtttttttttaggttttggatagttttatatattttttttaggttttatagatttataggttattaatttgggttttttaattttaaagatgaagtttttggtttgtggtggttgtgttgattaatttgtttggttttttaggatgtggatagtgttttttttatatttaggtattgtttttaaaataagtggaatttttttgtataattttgaatattaattttagggttttttaagtttattgttttttgtatatgtttgttttattttgtgtttttttattttatttttgtgtttttttttgtttattttagtatgggatatttgttgttgggttttgtaaatttatttatattaatttgggttttttaaattttatatgttgaattttaagttttttatgatatttagtagggttggaaggttggaatttttagagtatgaaaattgttttttatatttttttttaaatttggttattatatttagagtatgttgaatttttttttgaattataaatgatttgttttttgattgtttgagttttataaaatggagggatttttttagtgattttttaaagttattgagaatgttgtgggtgtgtgagttataaagttttggggtattaatgtttatggttttatatgttgtttggttatgaattaggttttttaagatgtagatagtgttatttaggtttttggagtatattgagtagttattaggaggtgtttaagtgtgatttaggattttttaggtttttttaaattatatagggttttttgggtttttttgggttatattaagtataaaaggattttttgggtagagtttatttttatttttgttatgttaggtgttgttaatggttttagtttttaaatattttgagtattttttttgtattataatatattgattattaaataattttttgggttttaggagttttataataagaattttgtttttttaaaatttaggtattggtttgaaattttaatggttaggattatattggattttttttttggttttttatatttggatgttttggatgttgttttttaggttttttaggaatatttagtattgtttttggattataggatagtattgattttttgggttttaaataatttattgagttattttaaagttaagtaatattttttttaaatatattgtatattttttattataaaatttgaaaatttttaagttttaagatttaggaattttgaattttttttttttaaaatgtatatatggatttttaagttttttaaggattttgagtaatttttttagatttttagatttaaaaatgatttttttggagtttttaaattgtggtattgttttttagttttttaaagtaaattgagatttttttttttttataaaataattgaggttttttttttttttaatattgatttatgagttttttgattttatggtttttgttttgggtttttttatatttagaaaatgttttatggatttttaaagtatattaaaaaatgtttttgggttttaagaaattttaggtatggaaaaatttgtgatttataagttttttagttattaattaggtttttagaaatttagatattaaatttttattgggtaatttttatgtgttttaaaaatttgaaatgtgttttattggggtttttttaaatgtagatgatatttaggaaaatatatagttttttttttatttattaaaaataagttaatggaaattatttaaaaattagtatagaaaaataatattgattttatatttttttattttttattttgttttttttaaatgtattgattatattttaggtttttttaaaatttagatagtgtttttttttatttttgaagggtgttaaaatttttttttgaagttatagtaattatgaaggttattttttttttggttgttgttagtgtttaggttattaatttatatttttaagatgtgaaaattaattttagtttttttttaatatattaagaatgtgtttggatttttaaaatgtgttttttgtttttatttgttaattttatgtaatatggttttatggtaaaatttttaattttatatggagaattttttttaattatttttttttataaattggttttttaagttagttggtttttatttgagatttttttttttatgtttttaattgtatggagtaattttttttattttttaaatttgtaatttatttttttggagttttgagtttagttattaattatggtttttatattaatggagtttttggggtttttttttttaggatatttatttgttaagtttgtaaggtagaaagaattttgttttgtgttttttaaaatttgggtattgtttttggtttgttggttatttattgtagtttttttaattttgtgtatagtgggtattggttttgggtttttttgttttttatgaagtttttagagtaatttggatttgggaaatttttttttagtgttgtttaaatatatttgggttggttgtgtgtttttaggatgtggatagggagggtttttttgtgtttaggaaagtgattgggtattgtttttagttttttttaaatttgggtattgtttttgggttttttaatggattgggtgttgtttttggatattgaggattggttttggggttttgtttatttttagtagtgtttattgtttgttatagagtgtttgattgtttgttgtttgagtttttggtgtgtttgtggatgtagtttttagttttgtggtgagttttttgttgtgttgattttttttgtttttgtgtttttgattggtttttggtttgtatttgttgttgttttgttggtgttggtgtttgtttttggttgttgttggggaggttggtgtggggtgtgggatatggttgtggatttgtggttggtggttgtgtttgtttttgttgggtgttttgaaatttgtgttatttttgtttgtttattgtaaagattttatttgtggggaaagtggttggagggttttaaagtggggtgggtagggggttggggtgagggatgtggaggagaggtgtttttgttgggtggtaaagtgtttttagtttgtgggtttaggattttgttgggaggtgtgtgtggagtgtgggtgaagtgattgatggtggagtgaggggggtgaggggggttaggggggtgtgagattttgttggtggttttttttttttggttaggtttaggtggtggggggttggtggggtgtgggattttgtgtgtggtttttgatttggtaaaaattatagtgtttttttatattgtttaaattttttaggagatggtttttttagatttttaaattattgtggtggtttttgagattgaatttgtgtttatgtaagtttaatgtattgaggatggggtaattattatttagatattttgggtgggttgtaaaggtgagttatttagatgtattttggtgagtttggttatgtaggtaggatttgagttgtgttttttgttttgatttttttttttttggtggttggagtttttgtaggttttaagtttggtttagatttggtttggtgtagttggttttttgtgtgttttgtatttggtgggggttttggggttttggtgtggtattggggggtgtttgggatttggttgaggttttaagtgttgtgtggttggttttttttgttggggtaggtggtggttgtgtgttttgtttgagtttaggggtttttttagttgtaataattagtaaggattttttgatttagttttaagttatttgtatttgtatttagatggggtgtatttgtagtgtagttttttggtggggtgttgggagtttgtttgtttttgtttgtttggagattttagtttatgagtataggttgtttgggtattttagaaatttgggatggggtttttgaattttttagaatgggtatttagtatggttttggtgttttgtggttttttgttttttatttagttttgtttttgtgtattttttagtttttgtgattgttgtttttttttttggggttttagggtttttagtttgtattttttgttttgtttttggtttgggttgtgggggtgggttgggggtggggtgagggttttgtgggtgtttattggtgtgggtgtgaggttagtgaggtttgtgtgggttttgggttgtgggttggtgtgattataagagttgggtgtgggtgtttgtagtttgtttgttttttggtggagttgtgtgaggtttggttggttttggttttttttttttggttgtttttgttttttggtttatgtttgtttgtgttttgtttattagtgtttttattgggtaaggtggttttgtgttgatgttgtttgttgttttgttgttgatttttgttttgggtgttgtttgtggggttgtgttttgttgggtttgtggattttttgttgttttttttttatttattttaattttttttatttttgttttgtttgaggaggtggttttttttgtaggtagtttggtttgtaggttgttggtgttgttattttttttgtgttttttttttagttttttttttggtgtgtagttttgggttgtttttttttttgtgttgtgttttggagtggttttggtgttgttattgtttgttttttttttgaggtttgggtttgtgatggtagagggttttgttggtttaaattgagttgggtgtttgtggtttgggtgtagtttttattttgttttttagttattgttttttttggttttttgatgtggtgtttttttttttgtttttttgtgttttttgtgttttttttggtgtttggttttggtttttgtttttttttttgtaattttttttttgtttttttttgttttttttagtttttagtttttgatttttttttttttttatgtttgtttttttgtttttgttgaattaaagtggattaattatatgttttttgtttttttttgtgttgtttttttttgttgtgtgtttgtttgttttttgttgtttttttttttttttgttttttttttggttttttttttttatgtttattttgttttttttattatttttgtttttttttatttttgatataatagttgattttattttttgatatttttttttttttgaaaagtataatatttggtttgttttagtttgaagatagtttgttttttttggataattagatgaattttttttttttttttaaaaaaaagttatttttttgttttgttttgttgtatatttggtttttgtgatttggttagagtggtgttggtagaggagtgtttggtaggagggttaatgtttgttgtttggtttgtgatatgtagtagggaggtgggtggtagtgttgttggtttttaggtaagtggtgtgtgtgggttgggttggggttggggttggggtggtgtgggtttgtgttggatgtttggttttttttttgtttgtttttggtttggggtttgtggggtttggtggggtggttgagtttgggggggaggaggaggaggaggaggaggatggatggttgtgggttttgttttttgtgtggagttttgtgtttattttggtggtggagttgggggtggggtgggggtgttgggaagggttgagggaggtgtgaggtgtttgtaggggtgattttttggttggtttgtgggtgtagggggtgttgttttatatgtgtgatttgtgttttgtgggttttggtttttggggtgttgggtaatgaggaggggtgtggagttgtagaagtttattttggtatgttgatgtggtgttagtgagattgtgagaggaagatgggggtgggtggggttaggatggagaggggttgagttggtaggagttatggtagatgttatatttgtgatattttttttatattttttttggttttgtttgtaatatttttaaataggagttttgggagagggggagaggggttgttggtttgaggttaagaagggtagagtttttgatttggagagaggttgtggtttttgtttagtgggtagtgtggaagtttttatataaggaggtgggaaggagattttttttttttttattgttttgtgtagagatgagttgggggtgtaggatgggagtttatggtattttgttatgggatggtttagggtttttggttgggggtgtaggagagaagagattggttgggaggagggagagggtgggagtaaaggtgtgggggagtggttagtagggagaggggtggggggtagggtggagtttgggttgggaggagttggtttatatataaaagttgaggtattgattagtttgtaaattggatattagttttttttgtgaaagagatttttagtttttttttttttttttttttttttttttttttgttttagtgagttttttgttgagttgtaggtaattagggttgtggagtgaggatttttgttgttattttattttagtttgaggtagggtagtagggggtatggtttatgtttgggttttgggttttgtagttgttagtttgttgttttttggatagtattttttttttttttttttttttgtttttgtttttatttggtttttgtttttttatttgttttttttttttttgttttttttttttggttttttttttgtttagtttagggttttttttgggtttttatttgttttgtattgttgtatgttttttgttttgttttttgttggttttttgatttggatttttaagtttagagtggtggggtttgttgtggaagtgtggtgagggttagagtggttagttggtggagtgtgtttttagaatttggaagggggtggtagagggggtggtgagaggattggttagggtttagttaaggagatgattaaggaggtttttagatttttggtgtagttgtttattagtttttagagagggtatgtaaagttgtgtttttgttttattgtttgtttagttgtttatataatttattgtattaaaaatttttttgggtttgtggagtgaaggttggggttgtttgtttggagggttttattttttgtaggggtagggttaatttgttgtggtggtttttggttttttatttttgagtgggttaatttggttttgtggttttgtagtttgtggagggggtgtgttttaagattggtttttttttttagattgtagtttggggaatttggtgttggattttttaggtggtttgagttggtttttttagtttttatggggagagtttggtagtgtaaatagggagatgttttggaggtttttggttttattggtttgatttgaggtttggaaaggaggttttgggtgtgtgtgtgtgtgtttgggggtatttaaggtagattggagttggagaattgggtgattgggaaaataaggtttttagagtatgggtggtgtggttgtgttaattattggagtttttgatttaggtttggtttagttgtagattggaaaggtggaaaagttagggggaggggtggggttggtttagtaggattggtttgttgttttgagggtgatggtttttttggattttttttgtttagttgggggttgtggggaggaagggattggtttttttggatgtatatgttttgtaggggtggggttgtttgttattttggttggtgttggaggtttgagaagtggtgatgtgatgttgggttggttttgtttttatggtgttataggatggaggttaggttgggtgtttagtttgggtttttgtagttgtggatgttgttgagtttttgtaataatgattgtggagatggttattttttgtgtaaaattattagtgttttttgtaaatggaaggaattgggttttttttgtgtgtttttggatgttttattttgtatatggttttgtgtttttattttggtattatgatttgtgtgttatttttgtaataaaaataatgtttataggaaagttgtgtttttaatttttaattgaatttgtaggttggtaaatttggtttgggaggggtatttttggtttggggtttggtttggttgttttgtttatgttattttttttttgtttttaga

SEQ ID NO: 316 - DNA, 8244 bp, Artificial Sequence
  chemically treated genomic DNA (Homo sapiens)
tttgggggtgggagagaagtggtgtgagtggggtagttaggttaagttttaggttagaggtgttttttttaaattaaatttgttaatttataaatttagttgaaaattgaaagtatggtttttttataaatattatttttattataaaagtaatatataggttataatgttgaggtgagggtgtagggttatgtgtagaatgaagtgtttagaagtatatagaaaaggtttagttttttttatttgtaagaagtattagtaattttatatgaggggtgattatttttatggttattattgtaggagtttagtggtatttatagttgtaggggtttaggttggatatttgatttggtttttgttttatgatattatgggggtagggttagtttagtgttatattgttattttttaggtttttagtgttagttaagatggtagatagttttatttttatagagtatgtgtatttaggaggattagtttttttttttttataatttttagttgagtagggggggtttaggaggattattgtttttaaagtagtaggttagttttgttgggttagttttgtttttttttttggtttttttatttttttagtttgtagttgagttaggtttgggttaaggattttaatggttaatataattatgttatttatgttttagaaattttgtttttttagttatttagttttttaattttagtttgttttgggtatttttaaatatatatatatatgtttagagttttttttttaggttttaaattgaattagtaaggttaggggtttttagaatatttttttatttgtgttattaaattttttttgtgggagttggagagattagtttaggttatttgggaagtttgatattaggttttttagattataatttggaaggggaggttagttttaggatatattttttttataggttgtagggttatagggttgggttaatttatttgggggtgggaggttgggagttattatagtaagttggttttgtttttgtagaaggtggaattttttaggtgggtagttttagtttttgttttgtagatttaggggagtttttgatgtaataaattatgtgagtgattgagtaggtagtgggatagaagtataattttgtatgttttttttaaagattagtgggtagttgtgttgaggatttgaaagtttttttggttatttttttgattggattttggttagtttttttattgttttttttgttatttttttttaaattttaagagtatattttgttagttggttattttagtttttgttgtgtttttgtaataagttttattattttgaatttggaggtttgggttaggggattggtagaaagtaggataggaagtatgtagtggtgtggagtaggtgagggtttaggaaaagttttgagttgggtaaggagggggttgaagggaaggaatagaaagggaaggagtaggtgagggagtagagattaggtgggggtaggggtagaggaaaagaggggaggggggtgttgtttgagaggtagtgggttggtggttgtagggtttgaggtttaggtgtgggttgtgttttttgttgttttgttttaggttggagtgggatggtagtgggggtttttattttatagttttggttatttatagtttagtagaaggtttgttggggtaggaggaggaggaggaagaggaggaggaggaagttggaagttttttttataggagaagttaatgtttagtttgtaggttggttagtgttttagtttttatgtgtgagttgattttttttagtttgggttttattttattttttatttttttttttgttgattatttttttgtgtttttgtttttgttttttttttttttttagttagtttttttttttttgtatttttaattgggagttttggattattttgtagtgaagtgttatgggtttttattttgtatttttggtttatttttgtatagggtagtgaagggggggggggttttttttttatttttttgtatggaaatttttatgttgtttattgggtaggggttgtggtttttttttgggttgaaggttttgttttttttagttttagattagtagttttttttttttttttttgggatttttgtttggaaatgttgtggatagagttagagggggtgtgggggagatgttgtgaatgtggtgtttgttatgatttttgttaatttggtttttttttattttggttttgtttatttttgttttttttttgtggttttgttggtattgtgttaatatattagggtgggtttttgtggttttgtgtttttttttgttatttagtattttggaggttagggtttgtaaggtatgaattatatatgtgaggtggtattttttgtatttatagattgattgggaagttgtttttgtagatattttatattttttttggttttttttgatgtttttattttatttttagttttgttgttagggtgagtgtggggttttgtgtagggaatgggatttgtagttgtttgtttttttttttttttttttttttttttttgggtttagttgttttgttgagttttgtaggttttgggttgggagtgggtggaggaagggttgggtgtttggtgtaagtttgtgttgttttagttttggttttggtttggtttgtatatgttgtttatttggaagttggtgatgttgttgtttatttttttgttgtgtgttgtaaattgaatagtgggtgttggtttttttgttggatatttttttgttagtgttgttttggttgagttgtgggggttgaatgtgtgatggggtagagtggggggatggtttttttttggggggggggggagaatttgtttgattgtttagggaggatgggttgtttttgggttggggtgggttagatgttgtattttttgggggggaaaaggtattgggaaatgaggttagttgttgtattaaggatagaggggggtagagatagtgggagagatagagtgaatgtgaaaggggggggttgaagagagggtgagggggagagaggatagtgagaggtgggtaggtgtatagtgggagagaatagtatggagagaaatagaaagtgtgtaattaatttattttggtttggtgaaggtgagagggtgggtgtgagggggggagggagttggaggttaggagttgggggggatgggagggagtgaagggaaggttgtgggagaaagagtgggggttggggttagatgttaagaggggtgtggggagtatagagaagtggagggaagggtgttatgttgaggggttgggggaggtggtgattggggggtggagtggaggttgtatttggattgtgggtgtttagtttggtttgggttgatggagttttttgttgttgtgagtttgggttttgggagggggataggtggtggtggtattggggttgttttgggatgtagtgtggaaaggggagtggtttgaggttgtgtgttggggggagggttggagggggagtgtggggggggtgataatgttggtggtttgtgagttggattgtttgtggggggaattgtttttttgggtgaagtggggatggggggagttgaggtagatgaagaggaggtggtggggaatttgtaggtttggtggagtgtgattttgtggatggtgtttgggatgggagttagtagtgaggtagtgggtggtgttgatgtggggttgttttgtttgatggaggtgttggtgggtagagtgtgggtaggtgtgggttaggaggtgggggtggttggaaggggggggttggggttggttgggttttatgtagttttgttggagagtaggtgaattgtgggtgtttatgtttggtttttatagttgtgttagtttgtggtttagggtttgtgtgggttttgttggttttgtgtttgtgttaatgggtgtttgtggagtttttgttttgtttttggtttgtttttgtaatttgagttaagagtggggtggggggtgtgggttgggggttttggggttttgggggggggggtggtggttgtaggggttggggggtgtgtgggggtgaggttgggtggggggtagggagttgtagagtgttaaggttatgttgaatgtttgttttagagaatttaggggttttattttgggtttttggggtgtttgggtggtttgtgtttgtgagttggggtttttgggtaggtaggggtaggtgggtttttagtgttttattaggaggttgtattgtgggtgtgttttgtttgagtgtagatgtaggtggtttggggttgagttggggggtttttgttggttgttgtggttgagggggtttttgggtttgggtggggtgtgtagttgttatttgttttagtagaaggagttggttatgtggtgtttggagttttagttagattttgagtgttttttggtgttgtgttggagttttggagtttttgttaggtgtgggatgtgtggaaggttggttgtgttgggttgaatttgggttaggtttggagtttatggaggttttggttgttagaggagagaggattagggtgggaaatatagtttaaattttatttgtatggttgagtttattggggtgtgtttaagtagtttgtttttgtggtttatttaaaatatttggataatggttattttgtttttagtgtgttggatttgtatagatgtgagtttggttttgggggttattatgataatttgggggtttggggaaattattttttggagagtttgaatgatgtaagaaagtattgtgatttttattaagttaaaaattatgtataaaattttgtattttgttagttttttgttgtttaagtttagttaaggggaaggggttgttggtggaattttgtgtttttttggttttttttgttttttttgttttgttattaattattttgtttgtgttttgtgtgtgttttttggtggagttttaggtttgtgggttagaggtattttattgtttggtgggagtgttttttttttgtgttttttgttttagttttttgtttgttttattttgggattttttagttgttttttttatgaatgagatttttgtaatgagtaaatgaaagtggtgtggattttggggtgtttagtaggagtgagtgtagttgttagttgtaagtttgtagttgtgttttgtgttttatgttggtttttttggtggtagttggagatgagtgttagtattggtgggatagtagtagatgtgggttgagagttggttaggggtgtagaggtggaggggattggtgtggtggggagtttattgtgaagttggaggttgtgtttgtgggtgtattaggagtttaggtagtgagtgattgaatgttttgtggtaggtggtggatgttgttgaaggtgagtgagattttggggttagtttttagtgtttgggagtaatgtttagtttgttggaagatttggggataatgtttaaatttgggggagattgggggtaatgtttggttgtttttttggatatggggaagttttttttgtttatgttttgagggtgtgtggttgatttaagtgtgtttgggtaatgttagagagaaattttttaaatttgagttgttttggggattttgtaggagatagagaggtttgaaattagtgtttgttgtgtgtggggttggggaagttgtagtgggtggttggtgagttgggaataatgtttaaattttggggaatgtaaggtagagttttttttgttttgtgggtttagtgaatgggtgttttggaggaggggattttggggattttgttaatgtgggaattgtgattaatgattaaatttgagattttagaaaaatagattataggtttgggggatgagagaagttgttttatgtaattgggaatatagagaaagaggttttaaataggggttagttagtttgggggattaatttgtgaggaggggtagttaaagaaaattttttatatgaaattgggaattttgttgtagagttatattatgtaaaattggtagatgaaagtaaggaatatattttggggatttaaatatatttttggtgtgttagggggaagttgagattaatttttatattttaagaatataagttagtggtttggatgttggtagtagttggggaaaaaataatttttataattattgtggttttagggaaaggttttaatattttttagagatggaagaaagtattgtttagattttgggggagtttggagtgtgattagtatatttggggaaagtaaaataaaaaataaaaaaatataaaattagtattatttttttatgttaatttttaaatgatttttattagtttatttttggtaaataagaaaaagattatatatttttttggatgttgtttgtatttgggggagttttagtgaaatatattttaagtttttgggatatatggaaattatttaatggagatttgatatttaaatttttggaaatttagttagtagttaggaaatttataggttgtaggtttttttatgtttgggattttttgggatttagggatattttttagtgtgttttgggggtttatggaatattttttaaatgtagggggatttagggtagggattataaagttaggagatttataaattagtattaaaaaaaaaaaaaattttaattgttttgtgaagggaaaaaaattttaatttgttttggaaggttgggagataatattgtaatttgggggttttaggaaaattgtttttgaatttaaagatttagggaagttgtttagagtttttggaggatttgggggtttatatgtatattttaaagaaaggggatttagaatttttaggttttaggatttaggaatttttagattttgtgatagggagtgtgtagtgtgtttgaaggaaatattgtttaattttgagatgatttagtgggttgtttggagtttaagaaattagtgttgttttgtgatttgagggtaatgttgaatgtttttagagggtttggagggtagtgtttagaatatttaagtatgggggattaggaaaagggtttagtgtgattttggttgttggggttttagattaatgtttgaattttagaaaagtaagatttttgttatgaagtttttgggatttagagaattgtttaatagttaatatgttgtgatgtagagaaagtgtttggaatgtttgggaattggggttgttagtaatatttggtataatagaaataaaagtaggttttgtttaaggggtttttttgtgtttggtgtagtttagagggatttgggagattttgtgtgatttggggggatttggagaattttgggttatatttgagtattttttggtaattgtttagtgtgttttagggatttgggtggtattgtttatattttaagggatttgatttgtggttaggtagtatatagagttatagatgttaatgttttaaagttttgtgatttatatatttataatatttttaatagttttggggaattattggggaaatttttttattttatgaaatttagataattagagggtaggttgtttatgatttagaaaaggatttaatatgttttgggtgtaatgattgaatttgggggaaggtatgggaagtaatttttatattttgagggttttaattttttagttttgttgagtgttatgagggatttgggatttaatgtgtaaagtttagggaatttaggttagtgtgaatagatttgtgggatttaatagtaaatgttttatgttgaggtgaatgggaaggggtgtgggggtggggtgggggggtgtggaatggggtggatgtgtgtgggaaatagtaagtttaggagattttggagttaatatttaaaattatgtgggaaagttttatttgttttggaaataatgtttaaatgtggaaaaggtattgtttatattttggggagttaggtaaattggttagtgtgattattatggattaagggttttgtttttaaaattagggaatttgggttagtggtttgtaaatttgtgggatttggagggggtgtataaaattgtttagagtttgggagaaagtatatttggggttttaggttatatagtgtaagtttggaaaagtttgttgggattgatgtgttttgatgtttttggaaattaatgtttaagaaaattattgtgatttgttgaaatggtgaatatatttagaa

SEQ ID NO: 317 - DNA, 16842 bp, Artificial Sequence
  chemically treated genomic DNA (Homo sapiens)
ttttttaaagtgttgggattataggtgtgagttattgtatttggtttgttatttatgtatttatttttttttgagataagtttttgttatgttgtttaggttggttttaaatttttaggtttaagagatttttttaaagttttgggattataggtgtgagttattgtgtataattttgaagtggttaattttaataatatatttattttagtttaatatatttaaaattatattattttaatatgtaattattattaaaattattaatgagatattttattttatttttatttatttatttttttgagatggagttttgttttgttttttaggttggagtgtggtggtgtgattttggtttattgtaagttttgttttttgggtttatgttttttttttgttttagttttttgagtagttgggattataggtgtttgttattatgtttagttaatttttgtatttttagtagagattaggttttattatgttggttaggatggttttgaatttttgattttgtgattagtttattttggttttttaaagtgttgggattataggtgtgagttattgtgtttggttagtgagatattttatttgtgttttttttttttttttttgagattgagttttattgtgttgtttaggttgtagtgtagtggtataattttggtttattgtaatttttgttttttaggtttaagtgatttttttattttagttttttgagtagttgggattataggtgggtgttatgatatttggttagtttttgtatttttagtagagatgggggttttattatgttgtttaggttggttttgaatttttgattttaggtgattatttgttttggttttttaaagtgttgggattataggtaaaagttgttatattaggtttattttttttttttttgagatggagttttattgttgtttaaggtggagtgtaatggtaagattttagttttttgtaatttttgttttttgggtttaagtgatttttttgttttagttttttaagtagttgagattatgggtgtttgttattatgtttggttaatttttgtatttttagtagagatagggttttattatgttggttagattggttttaaatttttgattttgggtgatttatttgttttggttttttaaagtgttgggattataggtgtgaattattgtgtttggtaggtttatttttaatttttttaattttggaaatttagtgtgtagggtaggtatggtgttttatgtttgtaattttagaattttgggaggttgaggtaggtggattatttgaggttaggagtttgggattagtttgaataatatggtgaaattttgtttttattgaaaatttaaaaattatttagttatggtggtgtatgtttgtagttttagttattttagaggttgagataggagaattgtttgaatttgggaagtagaggttgtagtgaattaagattatgttattgtattttagtttgggtaatagagtgagattttgttttaaaaaaaaaaaaagagagttagtgtggagggaagtgtttttgttgggtttgggtgttttgtgggattttgaggaaaagtttgtattaggtagatgttgttttgtttttatgggtaaaggatattttaataaattgaggagtaaaatgtttttgtatgttttttttgtgtagatttgttaggaagagtataagaagaaatatttggatttttttgttaattttgtggaattttttaagaagtgtttggagagatggaagattatgtttgtaaaggagaagtgaagtttgaagagaaggtaaaaagtgataaagtttgttgtgatagggagattaaaaattatatttttttgaaatgtaagaaagggtaagaaaggaaagaaaaaggattgtaatgtttttagaaggttattatttgttttttttttgttttgttttgaatattgtttaaagattaaaagtggatatttaggtttatttgttgtggaaattgtaaagaaattgggtgaaatgtggtttgggtagttagttaaagataaataattatatgagtagaaagtagttaagttataggagagatatgaaaagggtattgttgtatattgtgttaagggtaaaagtgaagtaggaaagaagggtttaaagaagaataaattagaagatgaggaggaggaggaggagaaagaagatgaagatgaggaggaagagggtgaagatgaagaataaatggttattttttaatgatgtttgtgtagtgggtttgttttgttaagaatgtgaattttagtatagtttagtattagttttagtataaaattgtataaatttttgtatagtttataagattttttgtatagaaaatattttttttttttttttttttttttgagatagagttttgtttttgttgtttaggttggagtgtaatggtgtgattttggtttattgtaatttttgttttttgggttttggtttaagtagtttttttgttttagttttttgagtagttgggattataggtatatgttattatgtttagttaatttttgtatttttagtagagatggggttttattatgttggttaggttgtttttaaatttttgattttgtgatttgtttgttttggttttttaaaatattgggattataggtgtgagttattgtattttgtttaatgtttttaaatatttaatggtttttaaaaaatttattgtgtatggtagtatagtatatttgtaggaattagtattaatagtatattttgtgttttttaagatgttgtattttttaatattttgtaataaaattatgtgtattaaaaaaataaagaaattttgtgtgtagtttatatttatagtatatttttgtttaggtatttgagagaatgattaggaggggtttttggaggaggtggtttttgaatggagaatttatttttaaggattttgtttgtaatggttattaagtattttttgagttatttttatgtgttttgtagttttttgaaggggtgtgggatttattgatgttaattatttagtattatttttagattttaagaagttggggtgtgagttagtaattagtatagaaaagagatattaaaataagtttgagttggggagtgtttttttaattttagttttttggaagagattttttttttttttttgagatagagttttgtttttattgtttaagttggagtgtagtggtatgattttggtttattgtaattttttttttttgggtttaagtgattttttttttttagttttttgagtagttgggattatagatatgtatttgtaatttttattaaaaatataaaaattagttgggtgtggtggtgtatgtttgtaattttagttattggggaggttgaggtaggagaattgtttgaaattaggaggtggagattgtattaagatagtttgttttagttaaataatttggtgttagtgtaggaaaaggtggaaggtatggggttagtataggagggtttaatatttttaattttattaagttatattttggtaatttttgttttttatgagaagtttttgttgggtttgttttagtgttgttttgaggttttttttatgagttttgatagggtagaggttgttttgagtgttttttttttttttggtttaagagtggtttaaaagaaggatttttgattggaattggttattttgtgttattttttgatttttgattttgttttaaagggggatgtgggggaggggttttggtaggggtggttttgttttttttaggtttgtaagtttaggtttttgtttattgggtttagtttattttgtggttgtttagggaggttgttggtatttgtgatttatgattttttttttgagttttattgaggttatagttgtggttttgtttttttatgtttgttttttgttttttgtttgtgatgggtgtttttgaggattaatgagtgtgttgtatttattttttgggtggggttaagtgttgattaattgttgtttgggtgtttggttgggtttaaatgttttaattgttagtggtggtggggtgggtagagggttggggatggtaggtttaattaatgggtgggtatgttgtttttgtgaggaggtgtgttttgtggttgggtgtgtggtgtttgtggtggtgtagggagggggagggaggtaaataagatggtggtggtgtgttgggtgtggaagggggaggtggtttggggtgtttgtgagtgaggtgtggggtggtgaagggagtgtgggtggtggtatttgttgttgtggttttggatgggttgggttttttttgttgttttgttttttttatatgtgtggtggttgtggtgagggggatgtgttgtttggggtttggtatttttgggaattttttggtttggagtttgtggtttgtgttgttttggttgttgggagttttgtggagtttttgttgttgtgttgttttgtggattggatgttgagggtatttggggtggggtgtgtgtttgggtagatgtttgtggggaggggggtgtttgttgggttttggtgattattttgggggttgtgggttggtttggggggtgtttagtgtgggtttttgtgggtgttgggtagtgattagttttgagtggagttgttggttgtggtgggaggttttttggatgtttttagttttttgaatgtttgtttgggttggtgggagttggtgttttttgggaggtttgtttggttgtttgtggtggagtgtttgtttttgggataggtggtgggattggggtgttgttggagatgtttttagtgaagttgggttttttaggtgtgggggttttggggggtagtgatgttgtggatttggtttgtgggatgggtggtttggagaagattgtgtttggttgtgtttatatttgtttgtgggtttgaggtttttggaggatgatttagtattgaaaagttttggttggtttttttagggtttttgaggatgaagttgattttgattgggttgttttttagttttgaggtttgggttttattggaatttgtgtttgagttgttgttttggatttttggtgtttgttggtttgtagattttgtattgggtttggatttgtagttgggattgatgtgtagaataattgtttttgttggaagaagggttttttttttttttttggggtttttgttgtttttttttttttttttttttttgtaaaattttggagaagggaagttggaatataaggaaggattgtttatttgtggatttagggttggtggtgggattttaggattttgggtttagtatggaggtggtggatttgtagtagttgggtatgtttatggagggtgagttgatgttggtgggtatggatatgtttatttattgtattgattttattgaggttatttattagttgtgttgtaagtgggttaagtttattggtaagtatttgatgggggatttgttgggggaaggtttttatggtaaggtgaaggaggtgttggatttggagatgttgtgtaggagggttgttaagatttttaagaagaagaagttgtgaaggatttttaatggggaggttaatgtgaagaagtaagtatggtttgttggggttggggttgggttgggttagttatggtgttgatggttttgttttttttttttttttttttttttttttttttatttttttttaatattttgagttggatttgtttggtgtttgtgttttttgtgttagggagagtgtggttgggggtttgtgttatggatttttatttaggtaaggttagttgttgtagtggggtgtgtgtttgtatgggtttttggattttagttaaaatgttttggtagtgaaatttttttgagaagggagtggtttttaattttttaagattagttttttggtttttttagttgtttaaggagtagaggtgtttagtggaattagtttgtgtttgtttgggttttgagagtttgtgtgtggttgttaatatgttttttgtgtagtgtgtggttgttattggggttaggtgaaatgtgatttgtttattttgttagaggggaattttgggttgttaaaaataattgtttgtattggtttattagttagtaggagggaaatgtagtttttttttatttgttagggatgtgatgttggaagtatttttggtttttggggttggaagttttgtttgagggggattgtgttttttttttgaattgtatttggaagattttatttttttaattgatttttttaggtatggggttgttgttgggtattttggatgtttttgtatttgtgtgtggagaagtttttatttagggtagtattggttggtttgagttttttttagttggtgggggtggttgggggtgtttttgttttattgtagttagatatgttgtatttgttgttgtttggtgggttttgtttaggttttgttttttttttagtttttttaatttttaaaattttgttttttgtttttaagaaaggattttatttgttgggttaggttttgagggattggtaaggatattttgtgtagggtattatgattttggaaggaggtttggggaggggttgttgtggtgtttgtttttattttttttttgtttaggggttttggggtttttgttgtgtttgtttttattttttttttgtttaggggttttggggtttatgtatatttttttttttttttttttgagatggagttttgttttgttttttaggttggagtgtagtggtgtgaattgggtttattgtaagttttgttttttgggtttatgttatttttttgttttagttttttgagtagttgggattataggtatttgttattatgtttggttaattttttgtattttttagtagagatggggttttattgtgttagttaggatggttttaattttttgattttgtgatttgtttgttttggttttttaaagtgttggtattataggtgtgagttaatgtgtgtggtttttttttttttttttttttttttttttgagatggagttttatttttgttgtttaggttggagtgtagtggagtggttttggtttattgtaatttttgttttttgggtttaagtgatttttgtgttttagttttttgagtagttgggattataggtgtttgttatagtgtttagttaattttttttttttttttttagtagagatggggttttattattttggttaggttggttttgaatttttgattttgtgatttatttgttttagttttttaaagtgttgggattaaaggtgtgagttattgtgtttggttagtatgttttttaattagtatgtaggttgtgatatgtggaaattaggggtataggttttgaagtttgtattttggagttggagtagttagggttaaatgggagtggttgggaagggtgtgtttttatgaggtttttttgatgttttagtgtttagtttggatttgggtagaaggtgtggttagtgttttgagttagtggagtagttgtttgtgtttggtttttgtgagatgggttggttaggggttaggtagagtttgtgtttggtttttgtgagatgggttggttaggggttaggtagagtttgtgttgggggtagtaggtgttttttaaaggggttagtgatagttttttttttagtagtgagaaatttatgtttaggggttgggtgtggtggtttatgtttgtaattttagtattttgggaggttgaggtgggtggattgtttgaggttaggagtttgagattagtttggttaatatggtgaaattttatttttattaaaaatataaaagttagttgagtgtggtggtgtgtgtttgtaattttagttatttgggaggttgaggtagaatattgttggagtttgggaggtggagtttgtggtgatttgagattgtattattgtgttttagtttgggtgatatagtgagattttgttttaaaaataaataaataaataaataaataaataaataaataaataaatttggtttgagttttgataaatgtatatgtagggttaatgggaagatagatgttggagggtggaagtttgattgtgagagtgagttttttgtttttttgaatagttagtggaggaggttttgggagtttaggtgagtatttgaatggtagggtagagtttgagggttttggtggagataggtaagaaggttgtaggaatttagtttggtttagtgtttgggagaatgggagggaatatggaggtagggaggtagaggggttggtaggatttggattggattgtgtgttgtagttatttatagtttgattttattgttttgaagtgagtgatgtatttttattagtgtttagtgtttaattttattttggttttgagtgtgtaatggttttgtttttgtggggttttttgggatgaggggtgagttttgtttttttttggttattgtttgttattaggagttgttttgtttatagttgtgatttaggagttattgtattttttttagttttttgggtgttgttagggggtttttttattttgggagttggtgtgttttgattggaggttgttatgtgtagagtgttgttaaggagaaggggtgtttattgtttagttttgaggtttaaggttttggttagttttgttgttagtgttgtagggaaaaagttttttttgtgtgtgggaagtttaataaattttgtttagattgtgttttgtagtgagtgtttggaattttttagataagttttaggtgtttggttttttagttggtgtggaaagtgtgggtgattattaaggggggtgggttggggtagatggagttggtgtgagttttgttttttttttttttttttagaaaggtagttttggagtttatgttttgttttgtttttattggtaaaaagtataattttattagaaataggaaagttttaaaaagtattaatgagttaaaaagagggttgggtatgtttggttatgtttgtaattttagtattttgggaggttaaggtgggtggattatttgaggttgggagttagtttgattaatatggtgaaattttgtttttattaaaaatataaaattagttgagtgtggtggtgtatgtttgtaattttagttattttggaggttgaggtaggagaattatttgaatttgggaagtagaggttgtggtgagttaagattatgttattgtattttagtttgggtaataagagtgaaattttgttttgaaaaaaaaaagggttggggttgggtgtggtggtttatgtttgtaattttagtattttgggaggttgaggtggtttgattataaggttagaagtttgagattagtgtggttaatatggtgaaattttttttttattaaaaatagaaaaattagttaggtgtggtggtatatgttaataattttagttattttatttgaggttaggagtttaagattagtttggttaatatggtgaaattttgtttttattataaatataaaaattagttaggtgtggtggtgtgtgtttgtagtttagttattggggaagttgaagtaaggagaattgtttgaatttgggaggtggaggttgtggtgagttgagattgtattattgtattttaggttgggtaagtttaggagagaagagtgaaattgtgttttaaaaaaataattaattaaaataaaattagtgttataggttgtttttggtaggtagtgggtttttagggtggagtagggaagggttggaaagggttgtttgtgtttagtttgattttttgtgttttttgggggatagtatggttagttgttgttgtggagtttatagtggggttttgggggggggggtgtaggtagaaggttgttatgtttttttttttttttttattttagtgagagtgggtttgaaggtagggagtttgtttgttttgtggagtttttgtagaggtatttagggttgttgtgagtgtatagtttggtggtgttttatggttttgtttttttttgttatttttatttgttgtaaaatattgtgtttttgtattttttttttttatttgtttggaaatgtgaaaattattgttgttgtaggaaatgggtttagatttgggttgtggtttttttatttgtattgtttttgtggtgtttagttaggaggtgggaggtgggtggtatttagtgtgtttggttgtggtgatgattggtagatgtttggatttatggtaaagaggatttttgtgagttgggagttagttttggattttgtaggtttttatattttaggtggtttttatggggttttagtatttgttgaggtttttgtgttagttatgtgaggtttgggtgtttttgaggtttttgtttgtgtttttttttgggtagtgggagggagagttttgagatttagagggagtttaggggttgggtagttgtagaatagtgggggtaatgggtttattgggggttttgggttgtgtatatagtgggtttttggtgtttagttagttggggtaggtttggaatgttggttttttttttaggatttggggtgttgttgtagttgttggggaattagtgaggtggttggatggtttgtatattttataaatgttattgtattgtttaaattggatttaatttttttaatatttttttttttttttttttttttttttttggagatagggttttattgtattgttgaggttggagtgtagtggtgtaattatagttttgggtttaggtgatttttttgtttttaaggtagttgggattgtagatgtgtattattatatttgattagttttttgtagagatggggttttgttatgttgtttaggttggttttaaatttttagatttaagttatttgtttgtttgggttttttagagtgttgggattataggtatgagttattgttttgttatgtttatttttatttatttatttatttatttttgagatggagttttgttttgttttttaggttggagtgttgtggtatgattttggtttattgtaagttttgttttagttttttaagtaagttggaattataggtgtttgttattaagtttggttaattttgtttttgtatttttagtagagatggggttttattgtgttagttagtatggttttgattttttgattttgtgatttgtttgttttggttttttaaagttttgggattataggtttgagttattgtgtttggtttatttttttattttttattttatagagataagggtttgttgtgttgtttaggttggttttgaatttttgattttaagtaattttttttggttttttaaagtgttgggattataggtgtaagttatagtattgggtttaaagtttattttttttttttttttttttttttttgagatggagttttgttttgttatttaggttggagtgtagtggtgtgattttggtttattgtaagttttgttttttgggtttatattatttttttgttttagttttttgaatagttgggattataggtgtttgttattatgtttggttaatttttttgtatttttagtagagatggggttttattgtgttagttaggatggttttgattttttgattttgtgatttgtttgttttggttttttaaagtgttggggttataggtgtgagttattgtatttggtaaagtttatttttttaaagtgtgtaatttagtggtatatagtatattgatagagttgtataattattatttttattagtttttagaatatttttgttattttagaaggaaattttgtttttgttagttattattttttattttttttttagttttggtatttatgtattttttttttgtttttggattggtttgttttgaatattttatatgagtggtgttatatattgtgtggttttttgtgtttggtttgttttatggagtgtgttgtttttaaggggtatttgtgttgtggtttgggtttgaatttttttgttgtttatggttgtgttattttttagtgtgtggagggttatgttgtgtttgattgtttatttgtggttggatatttgggttgtttttgtttttgtttgtgaattgtggttgttttggtgtatgtgtgtttagttggtgtttttttagaatttttgagggttttgttttagttatattaggagggatttagggattagggtatgtgggtttggagttgggtgtttttgggtttttatgtgttttttagttttgttttgagttgtgggaggttggggtgagggttaggtttattttttttttgtatgatttgtttttaggtagatggaggtttttagttttatttttttgtgagtttgagtggtgtttatgatttttttttttattttttgttttgttaattaataagttagttaaatagtttatgttgtttgggtaagtttagtaggtttttaatgtggtattttggagtggttggtgatgttttaagagttgggttttttttttttggaggttttttttgttttttgttaagtttttaggttttgttgggtttttttttttgttttttttttggttggagatgttagaggaagtttggtgatttagagaagttgatgtgtatttattattttggaggtgattgttattaggtgggggtggttttatttttattttttttttggtataaattgggggatgtatgtgtttgtgtagaatgttttggttttttttaattaaatagataatttagtgttttttggtttatgttgatttgtttaggagtgtttgggtttttttatgttttagttgttgtgtgttttgttgttgtgaagtgtttttgttgaggtggaggtagggtagggtgtttttggtgagggtgagtttttttgtgtttgtttttttatttgtagaatgatggtttatggaggagatatggtgttggtaggtggtggttggtgtagggaggtttttaggagggagttttttatttttatttgtttttagggttgtgtagttttttgagtggtttttatgaggttttgaggttgtatgtaggttgagtttttggttttattgtttttttttagggttaggattgtgttggagtttgggtgggtgtggggtggtttttgtataggtagtaggaggtgggttagagtggtgttggatttgaaggtttgtggtttttttagttttattgaggaggttggaatagtgttttgggttattttttttgttggtagttggtttttgttgagggagggggtgtttttgttttttggtggagtattaggtttttggggtttgtgtgtttgagtatttggtttttgttgtttgaaaatagtattttttttgttttttggttattgtattttttttgaatagaaggtaagttttgttttttaggaatggtttgtgatttttattagtgggggaggttaggggtatatagagttttggggaataaggggatttggggttgagttgggttttttgggtttattttgagtttttttgagtagtttggtaggtaggaaggtgttgggttttggggtttttgttgagtttagttttatttttagtgttttttttaatgttttgggtgtttgttaggttgtggatataggttttggttagttttataaataattttgttgggttttgttgggaattggtgttattattatatagtttagagagaatggaaatatagggttttttagtgagtagattaggtttgtggtgattagtggaagtgggggatgtttttagggttgggtagtttgatagggtattgggtatagttaggggttggaattagttgtttattggttttgtttttgggggattgtgtttttttgtgttttgtttttattatattttgttttttttttattttgtttttttagtttttttttagattggtggttttttgtttaggtttagttttagtatagtttgtagttttggtagagtttaggttttggttttttgaggttgttttgagggtagtgagtaatgagttttgggattggtgtattgggagggaaaggtgagttaaggttttttgtaagaggtagttttgagttgggggtggggaaggttgggttgtgggatatttttgatattttaagttttttttttgagatggagttttgttttgttatttaggttggagtgtagtggtgagattttgattttttgtaatttttgttttttaggtttaagtgatttttttgttttagttttttgagtagttgggattataggtgtttattattatgtttggttaatttttgtatttttagtagagataaggttttattatgttggttaggttggttttgaatttttgattttaggtgatttattttggttttttatagtgttgggattataggtgtgagttattgtgtttggttttttagttgttttttatgttttatgtttgggttttttgttaagaattaaaaaagaaaaaaaaaattatggagatggaatttatatattgtataatttatttgtttatagtgtataatttagtggtattaagtatatttatatggttgtgtaattattatttttaattttagaatgtttggttattttaaaagtaagttttatttttattgtgttattttttattttttttattagtttttggttattttgaatttattttttggttttggattggtttgttttggatattgtatagaaatgggattttgttggttgggtgtggtgatttatgagagtaagagatttagattattttggttaatatggtgaaattttatttttattaaaaatataaaaattagttgggtgtggttgtgggtatttgtagttttagtgatttaggggttgagttaggagaaattgtttgaatttgggaggtagaggttgtagtgagttgagattatgttattgtattttggtttggtgatagagtgagattttgtttttaaaaaaaaaaaaataagaaatgggattttgttattttagtgttttttgaggttgaggtgggtagatgatttgagtttagtagtttaaatgagattagtttgggtagtatggtgaaattgtttttattaaaatataaaaattagttgggtatggtagtatatgtttgtagttttagttatttgtggggttgagatgggaggattgtttgagtttgggaggtgtattttagtttgggtgatagggaaattttgttttaaaaaaaaaaaaaaaagtgtattatatattgtgtgttttttagtgttttattgtgatatttttaaggtgtagttaggttgtggtttgagttagagttttattggtttttgtggttgagttttgttgagtgtgtggatgggttgtgttgatttttgtttgtggaagggtttttgggtggttttatattttggttgttgtgtgttttgttgttgtgagtattttgtgttttgtttttgtgtggtgtgtattgttttttagggtgtgtatttgggagtggagttgttggtttatagggtaatagatttttggagaagttgtagatgtttttatgtttatttattgggtgtgaggattttgttttttgttatttttgtttttgtttaatttttttttttatgagatagggttttattttgttgtttaggttggagtgtagtagtatgattataggtaattataggtttaagtgatttttttatttgagttttttgagtagttaggatttgaggtatgtatttttatatttggttaatttttgtatttttagtagagatagggttttgttgtgttgtttaggttggttttgaatttttgagtttaggtgatttatttgttttggttttttatagtgttgggagaaatgaagtgtttgtgatagggtggtagttgtagagggggttgtgttttttggtttgttgtgttttatttttgtgataggtaggtgggtgtggttaattgggtggtagttgtagagggggtagtgataggtgggtgggtgtggtaggattttataatgtttttttttgtggtgtttttttttttgtttgtttttttttatgggttatttttttagtttatttgtggtttattttttaaggagtgggatttttggagttgggagtttttggttgtgtgggattgtattgtgtgatggagttattattagggttttaatttattttggtttttgttatagtttgggttttatttgtgttattattgtagtagtttggtttttaggaagtaaaattgttattgagttataaagtttaattaagagtgttttttgggaggttgaggtgggtggattataaggttaggagattgagattattttggttaatatggtgaaattttgtttgtattaaaatataaaaaaattagttggttgtggtgatatgtgtttgtagttttagttatttgggaggttgaggtagggaaattatttgaatttgggaggtagaggttgtagtgagttgagattgggttattgtgttttagtttagggatagagtaagattttgttttagaaaaaaaaaaaagtgttttaattgtgttttttaaagtttttgttggttgatgatagattagagggtgttgtgtttttattttttattgttttgagtttggatgtgtggtttttgtagggtttttttttatagtattgtgaatttatagtttttttttagggaagggaggaggtatgttatttttatagggagatggggaggttgattttagggatttaggttattattttgatgttgggttggttgatatatttttgttttttttgttttagg

SEQ ID NO: 318 - DNA, 16842 bp, Artificial Sequence
  chemically treated genomic DNA (Homo sapiens)
tttgggatagagaggataggggtgtattagttgatttaatgttaggatgatggtttggatttttggagttggtttttttatttttttgtggaagtggtgtatttttttttttttttagagagaagttgtgagtttatagtgttgtgggaaagggttttgtaggggttatgtgtttaggtttagggtggtagggggtgggagtatagtgttttttagtttgttattggttggtgagggttttggaggatatagttaggatatttttttttttttttgagatagagttttgttttgtttttaggttggagtatggtggtttgattttagtttattgtaatttttgttttttaggtttaagtgatttttttgttttagttttttgagtagttgggattataggtatgtgttattatagttggttaatttttttgtattttagtatagatagggttttattatgttggttaggatggttttgattttttgattttgtgatttgtttgttttggttttttaaaggatatttttaattgagttttgtaatttagtaatagttttgttttttagaaattagattattgtaatggtagtatagatggagtttagattgtggtaggagttagggtgagttggagttttggtgatggttttgttatatagtatagttttatgtagttaagggtttttaattttgagggttttattttttggagggtgggttgtaggtgagttggaaggatggtttataggaaggggtaggtgaagaaggagatgttatagaaagagatattgtggggttttgttatatttatttgtttgttattgttttttttgtagttgttgtttagttggttatgtttatttgtttgttataagggtggggtataataggttagagagtatagttttttttgtagttgttgttttgttgtagatattttattttttttagtattataggaggttgaggtgggtggattatttgagtttaggagtttgagattagtttgagtaatatggtgaaattttgtttttattaaaaatataaaaattagttaggtgtggaggtatgtgttttaagttttagttatttgggaggtttaggtgggaggattatttgagtttgtagttatttgtgattgtgttattgtattttagtttggataatagaataagattttgttttataaaagaaaaaattaaataaaaataaaaatgatgaggagtaaggtttttatatttagtgggtgggtgtggaagtgtttgtagtttttttaaaggtttgttattttgtgagttagtagttttatttttaggtatatattttgaggaatagtatatgttatgtagaaatggagtatgagatgtttatagtagtaggatgtatagtagttgagatgtggaattatttaggggtttttttatagatgaggattagtatagtttatttatgtatttaataagatttagttataaaaattagtgaggttttgatttgagttatagtttagttgtattttgaggatgttatagtgagatattaaaggatatatagtgtgtgatgtatttttttttttttttttgagatagggtttttttgttgtttaggttggagtgtattttttaggtttaagtgatttttttattttagttttgtaagtagttgggattatagatgtgtgttattatgtttagttaatttttgtattttagtagagatagttttattgtgttgtttaggttggttttgtttgaattattaggtttaagttatttgtttattttggttttggaaaatgttgggatgataggattttattttttgtttttttttttttggagatggagttttattttgttgttaggttagagtgtaatggtatgattttagtttattgtaatttttgttttttgggtttaagtgattttttttgatttagtttttgagttgttgggattataggtgtttgtaattatgtttagttaatttttgtatttttagtagagatggggttttattatgttggttaggatggtttggattttttgtttttgtgagttattgtgtttggttgataggattttatttttatgtaatatttaggataagttaatttagagttaggaagtggatttagagtggttaggagttggtggaggggatggagagtgatataatgggaatggggtttgtttttggggtgattgaatgttttggaattagaagtagtggttgtatagttgtgtgaatgtatttaatgttattgaattgtatattgtgaatgaatgagttgtatagtatgtaaattttatttttatagtttttttttttttttttaatttttaataggaagtttaagtatggagtataaaaaatagttggggggttaggtgtggtgatttatgtttgtaattttgatattatgggaggttgaggtggattatttgaggttaggagtttgaaattagtttggttaatatggtgaaattttgtttttattaaaaatataaaaattagttgggtgtggtgatgggtgtttgtaattttagttatttaggaggttgaggtaggagaattgtttgaatttgggaggtggaggttgtagagagttgagattttattattgtattttagtttgggtgatagagtaagattttattttaaaaaaaaaatttggggtgttaggggtattttatgatttagttttttttatttttagtttagggttgttttttgtaggaagttttggtttattttttttttttagtgtattagttttagggtttattgtttattgtttttagggtaattttagaaggttaaggtttgagttttgttagggttgtaggttgtgttggggttgggtttggataaggggttgttagtttggggaggggttaggagagtaggatgaagggaaagtaaggtgtgatggggatggggtatagagggatatagttttttagaagtggagttagtgagtaattggttttggtttttggttgtgtttggtgttttgttgggttgtttagttttgaaagtgttttttatttttattggttattgtaggtttggtttgtttgttgagaagttttgtgtttttgttttttttgggttatgtggtggtggtattaatttttagtagggtttggtaaggttatttatagaattggttagggtttgtgtttatagtttggtaggtatttagggtattgagggggatgttgagggtgaggttgggtttggtaaaggttttggggtttagtgtttttttgtttgttaggttgtttaggagagtttggggtgggtttgagaggtttggtttagttttagatttttttgttttttagggttttgtgtgtttttaattttttttgttgatgaaggttataggttatttttgggaggtaagatttgttttttatttagaggagatgtggtggttggggggtggggaaggtgttgtttttagatagtagaggttagatgtttggatgtataggttttaagagtttgatgttttattaggaggtgaaagtatttttttttttagtaggagttggttattggtagggaaggtggtttaggatattattttagtttttttagtggagttgagggagttatgggtttttaggtttagtattgttttggtttattttttgttgtttgtgtagggattattttatatttatttaggttttagtatagttttaattttgaggaggggtagtgaggttaggagtttaatttgtatgtagttttagagttttgtgggggttgtttgggaggttgtatggttttaaaagtaaatgagggtggaggatttttttttggaaatttttttgtgttggttattatttgttgatattatgttttttttatgagttattattttatagatggggaaatgggtataggaggatttgtttttattgaaggtgttttgttttgtttttattttaatggggatattttatagtagtaggatatatagtagttgaaatgtggaagagtttaggtatttttgagtaggttagtatagattaagggatattgggttgtttgtttaattaaaagggattaaggtattttgtgtaggtatgtgtgttttttgatttatgttaggggaggagtgggggtggagttatttttgtttggtggtagttatttttgggatgatgggtgtatattagtttttttagattgttaggttttttttgatgtttttagttagaaaaagagtagaagaggaggtttagtgaaatttaagagtttggtgaggaataggaagagtttttaggagggggaagtttggtttttggggtattgttagttgttttgaggtgttatgttaggggtttattgggtttgtttaggtagtatggattgtttagttgatttgttgattagtaggataggaaataggaaggagagttataaatgttatttaagtttatagagaggtggggttaggagtttttgtttgtttagaaatagattatatagggaagagatgggtttggtttttgttttggttttttatggtttagagtaggattgggaggtatatggagatttaggaatatttagttttagatttgtgtgttttggtttttgaattttttttgatgtggttgaaataaggtttttaaggattttagagggatgttggttgagtatatgtgtattaaagtagttataatttataggtagaggtgggagtagtttaagtgtttagttatagatgagtagttaaatgtagtgtggttttttatatattggaaagtgatgtagttgtgaatagtagagaggtttggatttaggttatggtgtggatgttttttgaggatagtatattttgtgagataagttggatgtaaaaggttatgtggtgtgtgatattatttgtgtgaaatgtttaggataggttaatttagaggtaggaagggaatgtgtgggtgttgggattggggagggaatggggagtgatggttgatagagatggggtttttttttggggtaataagaatgttttggaagttgatagaggtgatagttgtgtaattttgttaatgtattatatgttattgaattatatattttaaaaaggtgaattttgttgggtgtggtggtttatatttgtaattttagtattttgggaggttgaggtaggtagattatgaggttaggagattgagattattttggttaatatagtgaaattttatttttattaaaaatataaaaaaattagttgggtatggtggtaggtgtttgtagttttagttatttgggaggttgaggtaggagaatggtgtgaatttgggaggtagagtttgtagtgagttaagattatgttattgtattttagtttgggtgatagagtgagattttattttaaaaaaaaaaaaaaaaaaaaaaaaggtgaattttaggtttagtattatggtttatatttgtaattttagtattttgggaggttagagaggattatttaaggttaggggtttaagattagtttgggtaatatagtaagtttttgtttttataaaataaaaaataaaaaggtgggttgggtatagtgatttaagtttgtaattttaggattttgggaggttgaggtgggtggattataaggttaggagattgagattatattggttaatatggtgaaattttgtttttattaaaaatataaaaataaaattagttaggtttggtggtaggtatttgtagttttagtttatttgggaggttgaagtggagtttgtagtgagttaagattgtgttatagtattttagtttgggggatagagtgagattttgttttaaaaataaataaataagtaaataaaggtgaatgtggtgaagtagtggtttatatttgtaattttagtattttgggaggtttaggtaggtggatagtttgagtttaggagtttgagattagtttggataatatggtgaaattttatttttataaaaaattagttgggtgtggtggtgtatatttgtagttttagttattttgggggtaggagggttatttgagtttagagttatgattgtgttattgtattttagttttggtgatatagtgagattttgtttttaaaaaaaaaaaaaaaaaaaaaaaaaaaggtgttaagaaaattgagtttagtttgagtaatatggtggtgtttgtgggatatatgggttgtttagttgttttattgattttttgatagttatagtagtgttttagattttgagagaggaattaatattttaggtttgttttagttggttgggtattggaagtttattgtgtgtatagtttagaatttttagtggatttattatttttgttgttttgtggttgtttagtttttgagttttttttgggttttagagtttttttttttgttgtttagagaggggtataaatagaggttttgaggatatttaggttttatatggttggtgtaggggttttagtagatgttggaattttataaaggttgtttgggatgtaaagatttataaagtttaggattgatttttagtttgtgaaaattttttttattataggtttaagtatttgttaattattgttgtaattaggtatattgagtgttgtttattttttattttttggttggatattgtgggggtggtgtggatgggagagttatagtttggatttgggtttgttttttatggtagtagtgatttttatatttttaaataggtagaaagaaaagatatgaaagtatagtgttttgtaataggtggaagtgataggaaagggtagggttgtgggatattgttaggttgtgtgtttatggtagttttgggtgtttttgtggaggttttataaggtgggtagattttttgtttttgagtttatttttattggggtggaaagggggagggaggtatggtggttttttgtttgtatttttttttttagaattttattgtgggttttgtagtagtagttagttgtgttgttttttgagaagtatggggagttgggttgggtataggtgattttttttagtttttttttgttttattttaggaatttattgtttattagaaatagtttatggtattgattttattttaattaattgtttttttgagatataattttgttttttttttttaggtttgtttagtttggaatgtaatgatgtgattttggtttattgtaatttttgttttttaggtttaagtgattttttttgttttagtttttttagtagttggattataggtgtgtgttattatgtttggttaatttttgtatttgtagtagagatggagttttgttatattggttaggttggttttgaatttttgattttagatgaagtagttgggattattggtatgtgttattatatttggttagtttttttatttttagtagagagagggttttattatgttggttatgttggttttaaatttttgattttgtgattaaattgttttggttttttaaagtgttgggattataggtgtgagttattatgtttggttttagttttttttttttttgagatggagttttatttttgttatttaggttggagtgtaatggtatggttttggtttattgtaatttttgttttttgggtttaagtgatttttttgttttagtttttagagtagttgggattataggtgtgtgttattatatttagttaattttgtatttttagtagagatagggttttattatgttggttaggttaatttttaattttgggtgatttatttgttttggttttttaaagtgttgggattataggtatgattgaatatgtttagttttttttttaatttattgatgttttttggaatttttttatttttaataagattatattttttgttggtgagagtgggataaggtatggattttagggttgtttttttgggaaggaagggaagagatgggatttatgttggttttatttgttttaatttattttttttggtgattgtttatgttttttatattaattggaggattggatgtttgaggtttgtttggaaggttttagatatttgttgtgagatataatttgagtggagtttattaaattttttatatataaaggaggttttttttttgtagtgttggtagtaaggttggttaaggttttgggttttagggttgggtagtggatattttttttttttgatagtattttgtatatggtagtttttagttagaatatattagtttttagaataggaggattttttggtagtatttagggggttggaggaaatgtagtggtttttgaattatagttgtaagtggggtagtttttgatggtagatagtgattaggaagggatagggtttattttttattttagggggttttgtaagggtaaagttgttatatatttagggttaggatgaaattggatgttgaatattagtgagggtgtattatttattttaaggtagtggggttaagttgtgggtagttgtgatgtatagtttagtttaggttttgttaatttttttgtttttttgtttttgtgtttttttttgtttttttaggtattgggttagattaggtttttgtaatttttttgtttgtttttattaagatttttaggttttgttttattgtttaggtgtttatttgagtttttaggattttttttattgattgtttaggaaagtagggggtttatttttatagttaggtttttattttttagtgtttgtttttttattgattttgtatatatatttgttaaaatttaagttagatttatttatttatttatttatttatttatttatttatttatttttgagatagagttttgttgtgttgtttaggttggagtgtaatggtgtgattttgggttattgtaagttttgttttttaggttttagtaatgttttgttttagttttttgagtagttgggattataggtatatgttattatatttggttaatttttgtatttttagtagagatggggttttattatgttggttaggttggttttgaatttttgattttaggtgatttatttattttagttttttaaagtgttgggattataggtgtgagttattgtgtttggtttttaagtgtgggttttttattgttgggagagagattgttattggtttttttagagggtatttgttatttttagtataggttttgtttagtttttgattaatttattttatagagattaggtataggttttgtttagtttttgattaatttattttatagagattaggtataggtaattgttttattgatttaaggtattggttatattttttatttgggtttagattgggtattgagatattagaaaggttttgtggaaatatattttttttagttgtttttatttaattttgattgttttagttttagagtataaattttagagtttgtgtttttggtttttgtatgttatagtttgtatgttgattaagaagtgtgttggttgggtgtggtggtttatgtttttaattttagtattttgggaggttgaggtaggtggattatgaggttagaagtttaagattaatttggttaagatggtgaaattttgtttttattaaaaaaaaaaaaaaaaaattagttgggtattgtggtaggtatttgtaattttagttatttgggaggttgaggtatgagaattatttgaatttagggggtggagattgtagtgagttaagattattttattgtattttagtttgagtaataagagtgaaattttgttttaaaaaaaaaaaaaaaaaaaaaaaaaaaggttgtatgtgttgatttatgtttgtagtattagtattttgggaggttgaggtgggtggattatgaggttaggagattgagattattttggttaatatggtgaaattttgtttttattgaaaaatataaaaaattggttgggtgtggtggtgggtgtttgtagttttagttatttgggaggttgaggtaggagaatggtatgaatttgggaggtggagtttgtagtgagtttagtttgtgttattgtattttagtttggggaatagagtgagattttgttttaaaaaaaaaaaaaaaaaaatgtatgtgagttttagggtttttgagtaggagagaggtgagagtagatatggtaggagttttagggtttttgagtaggaggaaggtgagagtagatattgtagtagtttttttttggatttttttttaaggttatggtgttttgtgtagggtgtttttgttagttttttgaggtttagtttagtagataaggtttttttttggaaataggaggtaaagttttgaaagttaagaaggttgggaaaggagtagggtttgggtagggtttgttaggtggtggtaggtgtagtgtgtttggttgtgataaggtagggatatttttggttatttttattagttgggagaggtttaggttggttagtgttgttttaggtaggagtttttttgtgtatagatgtagaggtgtttgggatgtttagtggtagttttgtgtttgaagaagttagttggaaaagtaaggttttttggatgtaatttgggagggaggtatagttttttttgggtagggtttttagttttgggggttagggatgtttttagtgttatatttttggtaaatgaggaaaggttatgttttttttttgttgattgataagttggtgtaaatagttatttttggtagtttagggtttttttttgataggataaataaattatattttgtttggttttggtaatggttatatattgtgtagaaaatgtgttggtggttgtatataaatttttggggtttaaataaatataggttgattttattgggtgtttttgttttttggatagttgggggagttaaggggttagttttaggggattgggggttgttttttttttaggagggttttgttattagggtattttaattggagtttaagagtttatgtaaatgtatgttttgttgtgataattggttttgtttgagtgaaagtttgtaatgtaggtttttaattatgttttttttggtatggaggatataggtgttagatgggtttagtttagggtgttaagaggaagtaagggagggagggaggagagaaggaaggaagatagaattattagtattgtgattggtttggtttggttttgattttagtaagttatatttatttttttatgttggtttttttgttggggattttttgtaattttttttttttgaggattttgatggtttttttgtatagtgtttttgagtttagtattttttttattttgttgtaagagtttttttttagtaggttttttattaggtatttgttgatgagtttggtttgtttgtggtgtggttggtagatgattttggtggagttgatgtggtggatgaatgtgtttatatttattgatattagtttgttttttgtgaatatgtttagttgttgtgggtttattatttttatgttggatttagggttttggagttttgttgttagttttgagtttgtgggtgagtggtttttttttgtgttttgattttttttttttaaaattttataaagaaaaaagaaaaaaaaaaggtaataaaaattttaaaaggaagggaaaaattttttttttaatagaaatgattgttttatatgttagttttggttgtgagtttaagtttggtgtagggtttgtggattggtgggtattgggggtttgggatggtggtttagatgtgagttttagtgggatttgggttttagaattgggagatggtttggttagggttaattttgtttttggggattttggggaggttggttggggttttttagtgttaggttattttttggggattttaggtttatggataagtatgaatatggttgagtgtagttttttttgggttgtttattttataggttgggtttgtgatgttgttattttttgggatttttatatttggagagtttaattttgttgggggtgtttttggtgatgttttggttttattgtttgttttaggagtaaatgttttgttgtggatgattgagtggattttttggggggtgttgatttttgttggtttgggtgagtgtttggggggttgggggtgtttgggaggttttttgttgtggttaatagttttgtttagggttggttgttgtttggtgtttgtgagggtttgtattgggtgttttttgagttggtttgtgatttttaaggtggttgttggggtttggtaggtgtttttttttttgtaaatgtttgtttgagtgtgtgttttgttttgagtgtttttagtgtttggtttgtggggtggtgtggtggtgggggttttatggggtttttggtggttgaggtggtgtaggttgtaggttttgggttggggggtttttgaaggtgttgggttttgggtggtgtgttttttttgttgtggttgttgtgtgtgtggaggaggtggagtggtgaggggggtttagtttatttaaggttgtggtagtaagtgttgttatttgtgttttttttgttgttttgtgttttatttgtgggtgttttgggttgttttttttttttgtgtttgatatgttgttgttattttgtttatttttttttttttttttgtgttgttgtggatattgtatgtttggttgtagggtatgtttttttgtgaggatgatgtgtttatttgttggttgaatttgttatttttggttttttgtttgttttgttgttgttgatgattggagtgtttggatttggttgggtgtttgagtggtgattggttggtgtttggttttgtttgaggggtggatatagtgtgtttattggtttttggagatgtttgttatgggtagggggtgggaagtaggtatggggagatgaggttatggttgtgattttggtggggtttgggaagggggttgtaggttatgggtgttaatggtttttttgaatggttgtagggtgggttgagtttggtgggtgggaatttgggtttgtggatttggaaggagtggggttatttttattagagttttttttttgtatttttttttggggtgaggttaagggttaaaaagtaatataaagtggttaattttagttaaaaattttttttttgagttatttttggattaggggaaagagaaatgtttagggtggtttttgttttattggaatttatgggggaagttttaggatagtgttgggataagtttagtgggggttttttgtgaaaaataagagttgttaaaatatggtttgataaggttgaaaatattgaatttttttgtgttagttttgtgttttttatttttttttgtattagtgttaggttgtttagttggaataaattattttggtataatttttgttttttggttttaagtgatttttttgttttagtttttttagtagttgagattataggtgtgtgttattatgtttggttaatttttgtatttttagtagaaattataggtgtatgtttgtaattttagttatttagaaggttgagggaggagaattgtttgaatttgggaggaggaggttgtggtgagttgagattgtgttattgtattttagtttgggtaataagagtgaaattttgttttaaaaaaaaaaaaaagattttttttagaaaattgaagttgaaggaatattttttaatttaaatttattttggtattttttttttgtattgattgttggtttatattttaattttttggaatttggagataatgttggataattggtattggtaggttttatgtttttttagagaattgtaggatatatggaagtgatttaggaaatatttggtgattattatagatagaatttttgaagatggattttttgtttaaagattattttttttaagaattttttttagttatttttttaagtgtttggatggagatgtgttgtgagtgtgaattatatatggaatttttttgtttttttgatatgtataattttattataaaatgttaaaaaatgtagtattttaaaaaatgtaagatgtattgttgatattaatttttataagtgtgttgtgttgttatatataataaattttttaaaaattattaaatatttagggatattaggtagggtgtggtggtttatatttgtaattttagtattttgggaggttgaagtaggtggattatgaggttaggagtttgaaagtagtttggttaatatggtgaaattttatttttattaaaaatataaaaattagttgagtgtggtggtatgtgtttgtaattttagttatttaggaggttgaggtaggagaattgtttgaattaggatttgggaggtggaggttgtggtgagttgagattatgttattgtattttagtttaggtaataagagtgaaattttgttttaaaaaaaagaaaagaaaagaaaagtattttttgtatagagaattttatgagttatatgaaaatttgtatagttttatattgaagttaatattgagttgtattagaatttatatttttagtaaaataagtttattgtataggtattattaaaggatagttatttattttttatttttattttttttttttttatttttattttttttttttttttttttttttttattttttggtttgtttttttttgagttttttttttttgttttatttttgtttttagtatgatatgtagtaatattttttttatattttttttgtagtttaattgttttttgtttatatggttgtttatttttggttgattgtttagattatattttatttagtttttttgtagtttttatgataaataggtttgggtgtttatttttgatttttgggtgatgtttagagtaaaataggaagaaggtagatggtggttttttaggagtattgtgattttttttttttttttttttatttttttttatattttggaggaatgtaatttttaatttttttgttatagtgagttttgttattttttgttttttttttaaattttattttttttttgtagatgtggttttttatttttttaaatattttttggagaattttatgaaattgatagaagagtttgggtgtttttttttgtgttttttttggtaggtttgtgtgaagagggtatatgaggatattttgttttttggtttgttggggtgttttttatttatggggatagaatagtatttatttggtgtgagtttttttttagagttttatagagtatttggatttaatagagatatttttttttatattgattttttttttttttttttgagatggagttttgttttgttgtttgggttggagtgtaatggtatgattttggtttattgtaatttttgttttttagatttaagtaatttttttgttttagtttttggagtagttgggattataggtatatattattatggttggataatttttggatttttaatagagatagggttttattatattgtttaggttggttttgaatttttaattttaggtgatttatttgttttggttttttaaagttttgggattataggtatgaggtattatgtttgttttatatattgaatttttaaagttagaaaaattaaaaatgggtttgttaggtatggtagtttatatttgtaattttagtattttgggaggttgaggtggatggattatttgaggttaggagtttgagattagtttggttaatgtggtaaaattttgtttttattaaaaatataaaaattagttaggtgtggtggtgggtgtttgtaattttagttatttgggaggttgaggtaggaggattgtttgaatttaggaggtagaggttgtagggagttgagattttgttattgtattttattttgggtaataatgagattttgttttgaaagaaaaaaaaatgggtttggtatggtggtttttgtttgtaattttagtattttggggggttaaggtaggtgattatttgaggttaagagtttaagattagtttgggtaatatggtaaaatttttgtttttattaaaaatataaaaattagttaggtgttgtggtgtttgtttgtaattttagttatttaggaggttgaggtaagagaattgtttgaatttgggaggtagaggttgtagtgagttaagattgtgttattgtattgtagtttgggtaatatagtgagatttggttttaaaaaaaaaaaaaaagggtataaataaaatattttattggttagatatagtggtttatgtttgtaattttagtattttaggaggttaaggtgggttgattatgaggttaggagtttgagattattttggttaatgtggtgaaatttggtttttattaaaaatataaaaattagttgggtgtggtggtgggtatttgtaattttagttatttgggaggttgagataggagaaaggtgtgaatttaggaggtggagtttgtagtgaattaagattgtgttattgtattttagtttgggagatagagtgagattttgttttaaaaaaataaataaataaaaataaaataaaatattttattaataattttaataatgattgtatgttgaaatgatgtaattttggatatgttaggttaaagtaaatgtattattaaaattaattattttagggttatgtatagtggtttatatttgtaattttagaattttgggaggattttttgagtttaggagtttgaggttagtttgggtaatatagtaagaatttgttttaaaaaaaaataaatatataaataataggttaggtgtagtggtttatgtttgtaattttagtattttgggagg

SEQ ID NO: 319 - DNA, 1157 bp, Artificial Sequence
  chemically treated genomic DNA (Homo sapiens)
ggattttgttttttttgaaggttttagggaagagtgttttttgttttttttgaaggttttagggaagggtttgtttttttaggtttttggtggtttgtaggtgtagttttttaatttttttttttaagtggtttgttgtttataaggatatgagttatattggatgaggggtttattaattgatggtttttgtaaagtttttatttttaaataaggttatattgtgaggtattgggagttaggattttaatatagtttttttggtggatataatttaatttttaataatgtttatataattttaagtagggtttggtattttgtgtgttttttggagagtggttgagttaggttttggtagtgtttaggttattggtgattgtagtttttggatggtattgtttattataggttttggaggttgtttttatggttttttgatagggtttttgttggtttgggggtttttgattaggggagtggttttaggaggggagagatttgtgttttgggtttagtgtagttgttttgagtaggattgggatttttattaagtgggtgttgttttatgatttttgtgtgtttttaggattatttgggtatgtggtaggttgtttgtatgtttgtggattatttttgtgataggaaaaggtatgggttatttggtaaattaaggtatagagttttaggtggaagttgggaaggtgttgtttggtttgtattggttgaagggttatttgggttaggtgtatagggtagtggtgttgttggaggattagggttggtgtgttggtgtttagtgaggatgtgtagattgttttaggtttggtgttgttgtattgggtatgtgttgatttggttgggtgggaatattttgttttgtttgggttttgttttagttttgtttttgtgtgttttggttttgtttttgtgtgtttttttgttttttttaggtttttggttttgttttgttttagattttgttttatgttgttatttttgtgttttttggttttgtttttgtgttttggatatgttgggatagtttgtgtttttagaatgttttgtgttttgatgtttgtaggtttttgtggtgtgtattgtttgtgatttggtgagtgtttgggttgttttgtttttggaagagtgtggagttt

SEQ ID NO: 320 - DNA, 1157 bp, Artificial Sequence
  chemically treated genomic DNA (Homo sapiens)
gagttttgtatttttttgggagtgaggtgatttagatatttattaagttgtaaatggtgtgtattgtgaggatttgtgggtgttgggatgtaaagtgttttaggggtgtgggttgttttagtatatttggggtgtgggggtggggttgaggggtatggggatggtggtgtggggtggggtttagagtggggtggagttgaggatttgagaaaagtaagagagtgtgtgggggtggggttggggtgtgtgggggtggagttggggtggagtttgggtggggtggggtgtttttgtttgattgggttggtgtatgtttagtgtggtggtgttgggtttgaggtagtttgtgtatttttgttggatgttggtatgttggttttggttttttggtagtgttgttgttttgtgtgtttgatttggatggttttttggttggtataagttgggtggtgtttttttagtttttgtttgaggttttgtgttttagtttgttaaatggtttgtatttttttttgttatagggatagtttgtgggtgtgtaagtgatttgttatgtgtttgagtggttttgaaagtgtgtgggggttgtaggatggtgtttgtttagtgagaattttggttttgtttggggtggttatgttgagtttggagtgtgagtttttttttttttggggttgtttttttagttagggatttttagattagtagagattttgttagggggttgtgggggtagtttttagggtttgtggtgggtgatgttgtttaggggttgtagttattgatggtttagatattgttagagtttgatttagttgttttttagagagtatatagggtgttaggttttgtttggggttgtgtggatgttattaggagttgaattgtgtttattagagaagttatgttggagttttaatttttagtattttataatgtgattttatttggagatggggattttatagaagttattaattagtgggttttttatttagtatgatttgtgtttttataggtagtaggttgtttggggaggaggattggagggttgtatttgtaagttattagaagtttaagaggatagatttttttttggagtttttggagggagtagaggatatttttttttggagtttttagagggagtaggattt

SEQ ID NO: 321 - DNA, 8093 bp, Artificial Sequence
  chemically treated genomic DNA (Homo sapiens)
ttatggaaggaaatgagattagttagtgagttgatatagaataaggtagtttaaaataaatttttttaaaaatatgaagaatagatattgaagggaagaggtgtttgtaaagattaagaaagtatatttggagatggtatttttttaaagttaaagttattaagtgtttaagtgttttaaggagggtaagattattaataaggatttagtatagtagagtaatttgagtggtaatatgggatattgggaatataaatttgttaagaaaattagtaggaatgagttataggatagtaattggtaaggatttaataattttttttttaatgtatgtattttaattatatttattgttataataggattagtaataattatatttatttaaaaaaaaaaagattgttatgtagttatagaattatttaatatagaaaatagtaaaatatatttttttttttttttttttttttttttttttttataaataagattagtttatagtaaattttttatagttaagggttaatttaaaatttttggtttatattttttttttatttaatgattatatgatgtaaattaattttattaatattttaagtaaaatatattggaattttataaaatgtataagattttaatatttaaggaattggggttagaaagtagaagtggtttttaggttttttagttttttttttaagtaataaagttttgttgtgaatatttaaagttattgggaaattattggtagatttttttgttttttttttttggttttttattatgttgtttttttagatatgtaagtttattttattaattaaaattttagtttgattatttttgataagtatttaattgatatgtaattttttttttgttttaaatatgtataataggatagagtttttaaatttgatttaattattaatttttgatttataagtgttatggtgagttaatagaatttattaatgtttttattgtattttattagttaaatttagaaggttggaattagttttttttatttagtattttgttagtttgtttagtttgtatttttaattttgtttttaatggtaatttgttttattttttgaaataaaataatttatattttgggagggttaattttttattgtgttaggttgttttatgtattgtaggggtgagtgtttttaggtttaaatgttaatagaagtttttagtaaatatgataattaaaaaagtgtttttatatattttttagtattttttggaatgataggttattgtttttagttgaaagttattggtataattttggtttttaagtttttatgttatttattttaattgtttagatattaattttatttaaatttttagttatagtttggttttttgaatttgttggattagtaattatagattaaggtgttttaatagttaagataggattttggaataagagtttttaaattgtataatatttgagaggatttatgaatataaattgggttttgtttataattagttttatataatgaattttaagattgtttttttatggtgaatagaagtttggaaattattgttttggtataaagtagattattttagtagaaatatagaattattgtaatttgtgaataagattgtttttaaatatttttatttgtgtgttattttatatatagaatgtgtatgatagttttaaattttagaataaatttatttttagtatttaataaaatttgatattgtattattttaaaataaagtgtttattttaggtaggattttttaaaataaagtagtaatatttatgtagataagataaaaaagttaaaatattttatattttttaattttggagtgtaattttttttttttattgtttttgatagggttaaatttgtgtttatagtaaaaaaaaaaaaaaaaagaattattaattggtaattattaagattttatatttattatagttttttaataggtaagttgataaaatagtttttagttattaaaaaaaaaatttaaggaaaatttttaataattagttttatttttaaattgtatgaagttttttatatttgaaatttaaaaatgattttaatgattttttttattagtaatgtgttattattgaggtgggtgatggggagggaagagggaagaaatttgttagtattatttttgaatttagaaatgtttaaaaaaaagttttaaatattttgatggttagataaaatatttttattgttatgtatgggttttttttttggaaatttatgaatttgttatgtgagtttttgtaaattggtttaaaagtatatttaaggagttgataatttaagattatatgaattagaattttaatattttattaaaataagagttgaaatttttggtatttatttttagaatatttaaaaaatagattgtaaatttaatttatattaatattaaatttttttaaaattaattatattataaaagataatgattttgttattaaattaagttttaaaaaaggtggtatttttatgttttagttttatgttgttatttgagatgaaaaaaaaggtaattgttagaattttaattgtgattagtttggatggttggtatttggtatttttttataatttaaattagtaaatttgaaaatttaaattaatttttgtttttagaattaaatttttgttgagttttttaattttgtattataaagttttatggattagatttattttttttttttataaggttattttaattgggttttattttagttgtggtaatttgaaatagggtttggagatgtttatttgttaatggttgatttaaagtgtgttggttttgagttaaatatgaaaaagtttttttatagatttggttattattaaataaggatgttattttataggtaatttttttgataattgggtaggatttagtagataatttagtataaaattgttttaagtttttgattttgtatttattttaaagattagtgtttgtttgaagttttgttagttttatttttattgaaataggtgtatatttaggtttaaagttaaatggatttgaaaaaagttttaagttttttttaatgaatttgaggtttttaaaatgttttttaaattttttttggagatgatagattattatttgatatttattaggattaaatatttttttattttttttattttgttgttttagtttattaataatttttttgagggtaggaaagtttgttagatttttttttttaatatgtttttgaaataaatttagtttaattttgaaagtataaatatggttaaaggtagtagtagtaaagattttattaatttgtaattttttattgagtttttgaaggtgttttataatgtttattaagaagttaaagttataaagttattgtttgtttgagaagtggattgttgttgtttttattgaaattaagaatgtttttatttttttttttagagagaatattagttttaaagtttttttttttttaagttaattgtttagatattgtttattaatttttttattatgttttgatttagattttgttagtaaagtttgaaatttaggttgtttaatgtttttggttttaattaaaattatttatttggatatggtatttatgatttgattaatatttatattataggagtttaatagttttaagtgaagaaattttgaataatgaatgatattttaatagttggggtttatggtttttttttttatgtatgagatgagttttgagtttttattaattatttttaaagtatgggttgtggttagtttaattattttttgtaagttaagttttgttgtttgtagggattttaggattgttgatatgagtgtattaatattgaaatgatgagttaggttgattatggttagaagatttttttgtatttttaatttagggtttatattgtggataaagattaggaggtagtttttataggttataaaagtttggttgtttaaggtaagagaataggttttaaagtttttggtttggttaaaaagttggttgtgtagatttttgttaatgtttaggattttttgttttgtgatatttggagataagttaatgttttgtaggatgtttatatgtttgggtagtattttttttagtaatatttttatgtattggtatataaagttttttttattttagttgtgattttttaaggttaagaggtggtagagtttgaggtttgtatgagtagttttttttttaggagtgaaggaggttatgggtaagttgttttgatgtagatgttttattagggttgtgtgtttgttgtttgttatatattgtttgtagtatttgtgtttagttttgtagtggtgtttgatgttgtgtttgtgggtagttatgatgaggtggtgatagattaggtatagggttttattgttttttggaggttttattattaaataatgttgggtttatttgggttggaaaattagagttttgttgatttttattttgttttttttgggtgttatttatattttgtgggaggttataagagtagggttaatgttagaaaggttgtaaggggagaggaggagtttgagaagtgttaagtattttttttgttttgtgttagattattttagtagaggtatataagtttggttttggtatttttgtttttattggttggatattttgtattttttgagtttttaaaaatgaattaataggaagagtggatagtgatttttaatgtgtaagtgtatatttttttaggtagtgggtagtagttgttttagggagggatgaagagatttagtaatttatagagttgagaaatttgattggtatttaagttgtttaattaatagttgttgttgaagggtggggttggatggtgtaagttatagttgaaggaagaatgtgagtatgaggtattgaggtgattggttgaaggtatttttgttgagtatttagatgtttttttggtttttttggtgttaaaatgttgtttgtggtaggggttatttggtggttggatgagatagtggtgaattgtattgtggtgggggaagttatttagtggttagttaatgttattaaagagatgattgagaattggtatggagggagttgagttgggtttatttaagggttatgatttaatgggttgtgttatttaatggtgtggatatgtttttttgtttgggtagaggtatgtatagtgtatgtttataatggtggaggttgttgggttttttgatgtgttagttaggttttttttttttttgtagattgtgtgtttttttattgtttttttttgagattttttaagggttgtttggagtgtaagtggaggaatatatgtagtgttgttttaatggtattgttaattaagtaaggaagttatttaatttaaaattatgtatgtagaatatgtgaagttaaaagatgtataaaagtttaagatggggagaaaaatttttttttagagggtattgtgttattgtttttttgttttttatttattttagaaattatttgtttatatttaaaggtataatttattttgagttttttttaaaataaattgtttgtagttttaggataggttgatgtattttgggtttgatttttgattattttattgttaaattagtgattttttttagtgtttttttgttttttattttggaggatgtattttgaagatattagattttatgggttatttttggattttgaagtttataattgtgataaaaaatgtgaagggaagagatttgaaatatgtggaaggaaaagtgagtgtagattataaatttttaaaaagataagtttaaaatatatttaaatgttatgttagattattttgttaaaattagttgttagtgatgtttgtatgttaatagaaaaaagaatgttttagtttggagtggtaggtttttagagggatttattgtgaaagtataaattatttagggtaatgggattgagagaatagtgggtagaaaggattattgaaggaaaggaagagaattggaaggtagatgaaagaaggagtaagaatttggggatgtttttttttttttatttgtaatagtagtaatagaagtaatggtagattggtttttgtttttattgtgttagaatgaattgataggataattgggtttattattgtattgtgttagaatattgtaaaataaaattaaatatattagtttggtggtttgtaattaattatttaagtggagatttttattttttttttattttttttttagatggagttttattttgttatttaggttggagtgtagtggtgtgattttagttgattgtaattttttttttataggtttaagggagatttttttgttttagttttttgagtagttaggattataggtatgtgttattatatttggttaattttgtatttttagtagagatgggatttttttatgttggttaggttggtgttaaaatttttgattttaggtgaattgtttgttttagttttttaaagtgttgggattataggtgtgagttattgtgttttgtagttttttgtatttttaatagagatagggttttattatgttagttaggatggttttgattttttgattttaggtgatttgtttgttttggttttttaaagtgttgggattataagtatgagttattgtgtttggtttaagtggagatttttatatggagtttagttatattttttttaatatataagttgagatgattaatataattttaatataggggtttatgagaaatgtttgtaatatttaagtaatttattgtttttttttttttttttttaagatgaagttttattttgttgtttaggtggaagtgtagtggtgtgattttggtttagggtaatttttgttttttggttttaagtgatttttttgttttagttttttgagtagttgggagtataggtgtgtatgattatatttggttaatttttttatttttagtagagatggggtttttttatgttggttgggttggttttgaatttttgattttaggtgatttgtttattttagtttttttaagtgttgggattataggtgtgagtttttgtgtttagtttattattttatttttgaataaagaattgtttgtgtggggaatagataatttttttttatgtagtttttgttagaaaatttgttttttttagtagttggtttgtgtttataggttattttttgaaagtataaaaaatttattgattttttttttttgggtttttttttttttttgagatagagttttgtttttgttgtttaggttggagtgtaatggtgtgattttagtttattgtaatttttattttttgggtttaagtgatttttttgttttagttttttgagtagttgggattataggtatgtgttattatgtttggttaattttgtatttttagtataaatggggtttttttatgttggttaggttggttttaaatttttgattttaggtgatttatttgttttggttttttaaagtgttgggattatgggtgtgagttattgtgtttggttagaaaatttattgattttttaaagatttattaattttttgtattattttttttttttttttttattgtaaatataaaagggaatagtagagaaaattatttagaattttattttttagtgatattatttagtgatattttattagagttatttaggaatttgaggttgaataaagtttaggtaaaagtaaaattagttgagaagagatatttgttaaaagaaatttatttttaattttatttgttgttttttttagaggaatagaaatagtgttgaatgttttattagaaatgatggttgttttgtttgtttttttttttttttttatataatatgtaaatttatatagtgtatgagtttgtaagataaaggaaaaatatgttaatgaggtattattgtttgtatttggagtttgttattattgtttggtttatattaaaatatgtatattagagtagttgtagattgataaattattttttgtttgatttgttagt

SEQ ID NO: 322 - DNA, 8093 bp, Artificial Sequence
  chemically treated genomic DNA (Homo sapiens)
attggtaaattaaatagaaaataatttattagtttgtaattattttaatgtatatattttaatatgagttaagtaatgataataaattttaaatataaataatagtgttttattaatgtgttttttttttgttttataggtttatatattgtatgagtttatatattgtgtgagagagagggaagagatgggtagagtaattattatttttaataggatatttagtattatttttgtttttttaggaaagatagtaagtgaagttaaaaatagattttttttggtagatgtttttttttaattaattttatttttatttgaattttatttagttttaggtttttaagtgattttaataaaatgttattaaataatgttattaaaaaataaaattttgaatgattttttttattatttttttttatatttatgatggaggggaaaaaaaaaagtaatgtagaaagttaataaatttttaggaagttaatgaattttttggttaggtgtaatggtttatatttataattttagtattttgggaggttaaggtgggtggattatttgaggttaggagtttgagattagtttgattaatatggagaaattttatttgtattaaaaatataaaattagttaggtatggtgatgtatgtttgtaattttagttatttaggaggttaaggtaggagaattatttgaatttaggaggtggaggttgtggtgagttgagattgtgttattgtattttaatttgggtaataagggtaaaattttgttttaaaaaaaaaaaaaaatttaaaaaaaagaagttaataaattttttgtgtttttaaagagtagtttataagtatagattaattgttagagaaaataaattttttagtaggggttgtatgagaaagagttatttattttttatatagataattttttatttagaaataagataataggttgggtatgggggtttatatttgtaattttaatatttggggaggttgaggtgggtggattatttgaggttaggagtttaagattagtttggttaatatggagaaattttgtttttattaaaaataaaaaaattagttgggtgtggttatgtatgtttgtatttttagttatttgggaggttgaggtaggaagattgtttgaaattaggaggtagaggttgttttgagttaagattatgttattgtatttttgtttgggtaatagagtaagattttattttaaaaaaaaaagaaagaagataataagttatttaaatattatagatattttttatgagtttttgtattgaagttgtattagttattttaatttatatattaaaaagagtataattggattttatataaaaatttttatttgagttgggtgtggtggtttatgtttgtaattttagtattttgggaggttaaagtgggtagattatttgaggttaggaaattgagattattttggttaatatggtgaaattttgtttttattaaaaatataaaaaattgtagggtgtggtggtttatgtttgtaattttagtattttggaaggttgaggtaggtggtttatttgagattgagagttttgatattagtttgattaatatggagaaattttatttttattaaaaatataaaattagttaggtgtggtggtatatgtttatagttttagttatttgggaggttgaggtaggagaattttttttgaatttgtgaggaggaggttgtagttagttgagattgtgttattgtattttagtttgggtgataaagtgagattttgtttaaaaaaaaaataaaaaaaaaataaaaatttttatttaagtaattaattataagttattaagttagtatgtttagttttgttttatagtattttggtatagtataataataggtttagttgttttgttaatttattttaatatagtagaaataaaagttagtttgttattgtttttgttattattattataagtgaaaaggaaaaaatatttttaggtttttgtttttttttttatttattttttaatttttttttttttttttagtggttttttttatttattgtttttttagttttattgttttgaatagtttatatttttataataaatttttttagaaatttattattttaaattgaagtatttttttttttattaatgtatggatgttattaataattgattttaataaaataatttgatataatgtttaggtgtattttgggtttgtttttttggaagtttatagtttgtatttatttttttttttatatgttttaaattttttttttttatattttttgttatagttataagttttaaaatttaaggatgatttataaaatttggtatttttgaagtgtgttttttgaaataaaggataggaaaatattaagaggggttattaatttaataatagggtaattagaagttaagtttaaagtgtattagtttgttttaaaattataaatgatttgttttgaaagaaatttaaaatgaattgtgtttttggatgtgaatagatgatttttggaatgaatgaaaagtaagaaaatagtaatatagtattttttgaaaaaaggtttttttttttattttaagtttttatatattttttaattttgtatgttttgtatatataattttaaattaagtggtttttttatttagttaatggtattattaagataatattatgtatatttttttatttatattttaaataatttttaaaaggttttgggggagagtggtaaagaaatatatggtttgtggaaaaggagaaggtttgattggtatgttagggaatttggtggtttttgttgttgtgggtatgtgttgtatatgtttttgtttgggtaaagaggtgtgtttgtgttattgagtgatgtggtttgttaagttgtagtttttaagtgagtttggtttgattttttttgtattagtttttaattatttttttgatagtattagttggttgttggataattttttttgttgtgatgtggtttattattgttttgtttagttgttgaataatttttgttatgaatgatattttggtgttagaagagttaaggaaatgtttagatgtttaatggaagtgtttttagttaattattttagtgttttgtgtttatgttttttttttagttgtagtttatgttatttagttttattttttagtggtagttattgattggatagtttgaatgttagttaaattttttaattttgtgggttgttgggtttttttgtttttttttgaagtggttattgtttgttatttagaaggatatgtgtttgtgtgttagagattgttgtttgttttttttattggtttgtttttaggagtttggggaatatgaaatatttagttaataggagtagagatgttggaattgggtttgtgtgtttttgttgaggtgatttggtgtagagtggaggaggtgtttggtgttttttaggttttttttttttttttgtggtttttttaatgttggttttgtttttgtggttttttgtagaatgtggatgatgtttaaaagaagtaagatggaagttgatgaggttttagttttttggtttgagtggatttagtgttatttggtggtggagtttttggagggtgatggggttttgtgtttggtttgttgttgttttattgtagttatttgtgaatgtgatgttaggtgttattatgaggttgagtatgaatattatgagtggtatgtggtggatggtgagtgtgtggttttggtggagtgtttgtgttagggtgatttgtttgtggttttttttatttttgaagagagagttgtttgtgtaggttttgggttttgttgttttttggttttgaagggttgtggttggggtgagggggattttgtatattagtgtatggaggtgttgttgagagaggtattgtttgagtatgtaagtgttttgtaaggtgttgatttatttttagatattataaggtagaggattttgagtattgataggaatttatgtaattagttttttaattgagttagggattttaaagtttatttttttgttttggatgattaggtttttgtggtttatgagaattattttttggtttttatttgtggtgtaggttttgagttggaggtgtaagaagattttttgattataattaatttgatttattattttagtgttggtgtgtttatgttggtaattttagagtttttgtagatagtagggtttagtttgtagagaatggttggattgattatgatttatattttgaggatgattggtgagaatttaggatttgttttatatatgagagaaaaggttgtaagttttaattgttggaatgttatttattatttaggatttttttatttggaattgttgagtttttatgatgtagatgttaattagattataaatattatatttgaatggatagttttgattaagattagaggtgttaggtgatttgaattttagattttattaatggaatttgaattagagtatggtgaaagggttaatggatgatgtttgaataattggtttaggagagggaaaattttaaaattaatattttttttaagaaaagaaatggaagtgtttttggttttagtaggggtaataatagtttattttttagataaataatggttttgtgattttggttttttggtggatattatggaatatttttgagaatttagtgaagaattatgagttagtaaagtttttgttgttgttgtttttgattatatttgtatttttgaagttaagttgaatttattttaaagatatattgaggaaaaaaatttaatagatttttttgtttttagagaagttgttgatgagttaaaatagtaaaataaggaagatgaaaaaatatttgattttgataggtattaaatggtgatttgttgtttttaaaaagaatttgagagatattttaaggattttaggtttattaaaaaggatttagaattttttttaaatttatttaattttaaatttgaatatgtatttattttagtgagggtggagttaataaaattttaggtaaatattaatttttggaatgaatatagaattaaagatttggggtagttttatgttggattgtttgttgaattttatttaattattaaaggggttgtttgtaaggtggtatttttgtttgatagtaattaaatttgtgaaaaggtttttttatatttgatttgaaattaatatattttgagttagttattaatagatgagtatttttaagttttgttttgggttgttataattgaaatggagtttggttgggatgattttgtgagagaaagaaatgaatttaatttataaggttttgtagtataagattgaaaaatttaataagaatttaattttaaaagtaaaaattggtttgagtttttaagtttattaatttggattgtgagaaagtattaagtattagttgtttaaattgattataattaaaattttgatagttgtttttttttttattttaaatggtagtatgggattgaaatatgagaatgttattttttttaaaatttagtttagtgataaagttattgttttttatgatatagttaattttaaagagatttagtattaatgtgagttgaatttgtagtttgttttttaggtgttttgaagataaatgttaaaaattttagtttttattttaatggagtgttaaaattttgatttatatagttttaaattattaattttttaaatgtgtttttgaattaatttgtagaagtttatatagtaagtttataagtttttaaaaaggaagtttatatataatagtggaggtgttttgtttaattattaaaatgtttgagatttttttttaaatatttttgagtttgaaggtaatattgatagatttttttttttttttttttttattatttattttagtgataatatattattgatagaggaagttattagaattatttttaagttttagatataggagattttatgtaatttggagataagattaattattgggggttttttttggattttttttttaataattgggggttattttattagtttgtttattaaaggattatggtaagtatagaattttaatggttgttagttagtaattttttttttttttttttttattgtagatataagtttggttttattaaaaatgatgaggaaaaaagattgtattttaggattaggaggtgtgagatattttagtttttttgttttatttgtgtgggtattgttgttttattttaaaaaattttgtttaaagtaaatattttgttttaaaatgatatagtattagattttgttagatgttagaaatggatttattttaaaatttggaattgttgtatatattttatatgtaagatagtatataagtagaaatatttaaaagtagttttatttatagattgtagtaattttgtatttttattaagataatttgttttgtgttaaaatagtaatttttaaatttttgtttattatgaaaaggtaattttaaagtttattatgtaaaattaattataaataggatttaatttatatttatagatttttttaagtattatataatttaaaaatttttgttttaaagttttgttttaattattgaaatattttaatttgtggttattaatttagtaaatttaaggaattaggttatgattaagaatttaggtggaattgatgtttgggtaattaaaataaatggtataagagtttaaaaattaaagttgtgttagtggtttttaattagaggtagtaatttgttattttagaggatgttgagaaatgtgtaggggtatttttttggttgttatatttattaggggtttttgttggtatttaagtttaaagatatttatttttgtagtgtatgggatagtttggtataatgaagaattagtttttttaaaatgtagattattttattttaagggatagggtagattattattagaagtaaaattaaaagtataagttgggtaaattgatagaatattagataggagagattaattttaattttttaaatttggttagtaaagtgtaataaaggtattgataagttttgttagtttattatagtatttgtaaattaggaattaataattgaattagatttaagggttttgttttgttatatatatttaaggtagaaaaaaagttatatgttgattaggtatttattaagaatggttaagttgagattttggttaatagagtaagtttatatatttagagaaataatatagtggaaaattgaaaaaaaaaaatagaaaaatttattggtaattttttaatagttttgaatatttatagtagagttttattatttgagagaaagattggaagatttgaaagttatttttgttttttaattttagttttttaaatattgaaattttgtatattttgtgaaattttagtatgttttgtttaaggtgttaataaaattagtttgtattatgtagttattgagtgagggggagatataagttaaggattttaaattgatttttagttatagagaatttgttataagttagttttgtttgtaaaaaaaaaaaaaaaaaaagaaaaagaaaaaagtgtattttattgttttttgtattaagtaattttgtaattgtatggtagtttttttttttttaaataaatatagttgttattggttttgttgtagtagtgaatatagttaaaatatgtatattaaaaaaaaaattattaggtttttattagttattgttttatagtttatttttattagtttttttgatagatttgtatttttagtgttttgtattgttatttaaattgttttattatgttaagtttttgttaatagttttattttttttgaaatatttgaatatttgatgattttagttttgaggagatattatttttaggtgtgtttttttagtttttgtaggtattttttttttttaatatttgttttttgtatttttaaaaaaatttgttttagattgttttgttttgtgttagtttgttagttgattttatttttttttatgg

SEQ ID NO: 323 - DNA, 6521 bp, Artificial Sequence
  chemically treated genomic DNA (Homo sapiens)
ataaaattatgtatgggtaaaagatttaattaggtgtagtttagaaaaatggattttttttttttttttgagatagagttttgttttgttatttaagttggagtgtagtggtgtaattttggttaattgtaatttttgttttgtaggtttaagtgatttttttgttttagttttttgagtggttgggattataggtgtgtgttattattatatttgattaatttttgtagttttagtagagatgggagggttttattatgttggttaggttgtttttaaatttttgattttaggtgatttatttattttagtattttaaagtgttgggattataggtgtgagttattatgtttagatttaaattttttttgttttttttttttttttgggggtggggggtagggttttattttgttgtttaggttggagtgtagaggtttgattttggtttattgaaatttttattttttaggtttaagtaatttttttattttagttttttgagtagttgggattataggtgtgtattattatatttggttaattttttgtatttttggtaaagatggggttttgttatgttgtttaagttgtttttgaatttttgggtttaagtgatttttttgttttatttttttaatgtgttggaattgtaggtatgagttattatgtttggaataaagttttattttttaagtggattatttaaaaaaatgttttatggttaggtatgttatttttttttagtttgggtaagtgagttgagattgtgttattgtggtttggtttgagtgatagagggagattttattttagataaataaataaataaaattaaaataaatttaaatattttttatatgataaaattatttttaatggtaattataaaatgaataataagggttaagaaataaatttagtgaatattttttttttttgaattttgtaaatataattatgttagtataaaaatagttatgtattgtttaataatagggatatgttttgagaaatgagttattaggtaattttgttattgtgtaaatattatagagtgtatttttataaatttagatggtgtagtttattatttatttaggttatatggtatagtttggtgtttttaggttttaatgtttatagtatgttattatattgaatattgtaggtagttgtaagataatggtatttgtgtatttattgtagagatagggtttttttgtttgttgtttaggttggagtgtagtggtataattatagttttttgtagtttttaatttttgggtttaagtgatttttttattttagttttttaagtagttaggattatatgtttgtgttattaggtttgtttattgtttttgtttgttttttggtagagatggagggttttattatattgtttagattggttttgaatttttggttttaagtaatttttttgttgttttggtttttaaagtgttggtattataggaatgagttaaaagtttaatatggttgttgaataaaagattgatttaattaagtatggattttgtttttatggagttgaaggttgttagagtagataaaatgagttattatttttatatgagttagatggtggataaagttattattgagggtaggtaaagaattgggttggtttaaagatgttagggattttttttagattagtggtagagggttggttaaggagttttttgaaggaggtggttttttatttgagttttaaagaatagaagagattagatagggaggatagtaaaatttttttttttttttgaaatagttttgttttgttgtttaggttggagtgtagtggtgtgattttggtttattataagttttgttttttgggtttatgttatttttttgttttagttttttgagtagttgggattataggtggttgttattatgtttggttaatttttttttttttttttttttagtagagatggggttttattatgttagtgatgatttttgtttgtttgtttgtttttgagatagagttttattttgttgattaggttggagtgtagtggtgtgattttggtttattgtaatttttgttttttaggtttaagtgatttttttgttttagttttttgagtagttgagattataggtgtttgttattatgtttagttaatttttgtatttttagtagagatggggttttattatgttggttaggttggttttgaatttttgattttaggtgatttgtatattttggttttttaaagtgttggtattagaggtatgagttattgtatttggttagtaaaattatttgtgatatagtagtaagtgtataagtattgatttattagagttgaaggtggttgaggtatttaagtgggtttttggggattttgttatgttagggaatatttttttagataagggattaggaggtttggagggtttttaaggaagagttagggtagtaggggtattttggagttaggggttatggttatatgttaataggattagaaatattttaatgtatttaattaatttatataattatattggtgggtgtttattgaatattagttttagatatggatttgaaatggttttatttttttttagtttgtttaagttaatggagttttattagaatgtgagttataaaatagtagagttattttttatttaatgttgtatttgtagggtttagaatagtatttgaaggattggtggaggtttaataaattgttaaaagggtagattagttaggtgtgatggtgtgtgtttgtagttttagttatttgggaggttgaggtaggaggattatttgattttaggatttttgggttgtagtgtagtatattagttaggtgtttgtattaagttttgtattaatttggttgtttaaggatggttgaattgatttaggtggaaattggagtaggttaaaatttaatgttgattagtaatagggttgtatttgtaaatagttattgttttttagtttgggtaatatagtgagattttatttttaaaataaattttaaaaataattaattagaaaaaaaaattagtttgtaattttagtattttgggaggttaaggtgggtagattatttgaggttaggagtttaagataagtttggttaatatggtaaaattttaatttttattaaaaatataaaaattagttgggtgtggtggtaggtgtttgtagttttagttatttaggaggttgaggtaagagaattgtttgaatttgggaggtggagattgtagtgggttgagattgtgttattttattttagtttgggtagtagagtgtgattttgttttaaaaaaaaaaaaaaagaaagaaaagaaaagaaaaagaaaagaaaagaaaaaaattgggaggtttaagtttatttttggtgtttttatatttttttgttttatttttttgtatttagtttttttttgtaatttgtgttttatattagtttttaagtttttaatgtgatttagtatgagaattggattttgttatttttttgtttataatattttatgttttttttttgtttagaatattattttttttattgtttttattaatggaattggtatttttttaaggatatgattaaatttgtttatttttatattattttttaaagtagaatttatttttttttttttaatatgatgatattgatagggtttgtttttatttattagattgtgagttgtttagggtaggtagtgttttttgtttttgtttttgttttttttttttgagatagggttttgttttgttatttaggttagagtgtaatggtatagttttagtttattgtagttttaattgttttggtttaaattattattttattttagttttttgagtagttgggattataggtatatgttattatatttggttaatttttttgtatttttagtagagatagggtttggttatgttgtttgggttggttttgaatttttggatttaagtaatttatttattttagttttttaaaatgagggattgtgttttatttatttttatgtttttagtttatagtttagtgttggatttatggtagtattaaataaatatttgttgaatgtaatagtaaatagtattttagggagtaagaattagattaataaaggtggtaaaaggtttggagaaaaaaataatagtttaatttggttagagtatgagggagagtagtaggagataagatggaaaggttttttgggtaaggttttgaaggaagttggaagttagaagtatataatgtgtatattgtggtaggtagtggggagttaatgaaggtttttgagtaggagagtaatgtgttgaaaaataaatataggttaaatttattagagtttttttgatatatatatttgttttttatttaagtttaagtttgttttttatatatttattatttaatttatttttgggtttttttagtagtttgttttatttttttatttgttttttggtggagttagggatgtatatatgagttgtttttttttttagttagaggatatgggggttttagtttttttgtttttttttttttgtgtttggagttgggaagtaggttagggttagttgaggttggttggtaagtagttgggtggtgttagggagagtttgtatagtgttaggtggtgttttgggttttaagttgagtttatggttttgataattttttgtttgtgtatatatttgttttttattttatttttattttagttttggtatgggggagagggtatagggttagataaatttgtgagattttggttttatttttgtaaaagggtgttttgtgagttagtttgtttttttttaggtttgttttttttttatttagtttttgtttttaatgtatgtatagtttgtatatattgtgtgttgggatattttatagttagttgtatggtttttttgtgttttagtttttggttttttttgttgattttggtttttgttttaggttttattgtgtaattgttgttgttattgttgtttttggtgtttgtttatttttagaggttgttttggatgtaggaggatttttttttgggaggaggtttttttggggaagatgatttattgggtgaggaggatttgtttagtgaagaggatttatttagagaggaggatttatttggagaggaggatttatttggagaggaggatttatttggagaggaggatttatttgaagttaagtttaaattagaagaagagggttttttgaagttagaggatttatttattgttgaggtttttggagatttttaagaattttagaataatgtttatagggataaagaaggtaagtggttattaatttttaaatttaggttttaggaggtttatgattttttttttatattttagtttaggttttgtttatttagggaaggaggggagattgtattttttatagaagtttttttagaggttttatattaatatttttatttttatttttggaggtagaaagggatagatgtggagagaaaataaaaagggtgtaaaaggagagaggtgagttggatgagatgggagagaagggggaggttggagaagagaaagggatgagaattgtagatgagagaaaaaatgtgtagatagaggaaaaaaataggtggagaaggagagttagagagtttgaggggaagagaaaaggaaagtttgggaggtgaagtgggtattagagataagtaagaagagttggtagaagttattttattttaggttataatgaggaaattgagatttaggaagaagggatatagtaggtagagaaatgtggttttttgatttttaagttaggaatttggggaaaggggttggagattatataaggtagagggatgagtggggagaagaaagaagggagaaaggaaagatggtgtatttatttatttgggatttaggattgaagtgtttatttattttttttttttttttttttgagataaatttttatttttgttgtttaggttggagtgtaatggtgtgattttggtttattgtaatttttattttttgggtttaagtgatttttttgttttagtttttagttaagtagttgtgattataggtatgtgttattatgtttggttaatttttgtatttttagtagagatggggttttgttatgttggttaggttggttttgaatttttgattttaggtgatttaattattttggttttttaaagtgttgggattataggtgtgagttatagtgtttggtttgaagtagttatttatttttatagattttaagataatgattgtaagttggtaggattgttgtttggtttatttagttgtggtgttgagtttgggtgtggttttttgtgttttgtatttggtttgtttaaggtatttgttatttgtaatgtttttgtaaggtatttgtgtttgtgatattgttttggttgttaggaagggattggggttttaagtttgagtggtttattttttttatttatatagg

SEQ ID NO: 324 - DNA, 6521 bp, Artificial Sequence
  chemically treated genomic DNA (Homo sapiens)
tttgtataaatgaaaaggatgaattgtttaagtttagagttttaatttttttttggtgattaaaatgatgttataaatgtagatgttttataggagtattatgggtaataaatgttttaagtgggttaggtgtaaagtataggagattgtatttaaatttaatattgtagttgggtgggttaaatagtaattttattagtttgtaattattgttttagggtttgtaaaagtgagtggttgttttaggttaggtgttgtggtttatgtttataattttagtattttgggaggttagggtggttggattatttgagattaggagtttgagattagtttgattaatatggtgaaattttgtttttattaaaaatataaaaattagttgggtgtggtggtgtatgtttgtaattgtagttatttggttagaggttgaggtaggagaattatttgaatttgggaggtggaggttgtagtgagttgagattgtgttattgtattttagtttgggtaataaaagtgaaagtttgttttaaaaaaaaaaaaaaaaaaagtgagtgggtattttagttttgagttttaaatgagtgagtatattattttttttttttttttttttttttttttttatttatttttttgttttgtatggtttttaatttttttttttaaatttttggtttgggagttaagaagttatgtttttttatttgttgtgttttttttttttaggttttaatttttttattgtagtttaagatgagatgatttttattagttttttttgtttgtttttggtatttattttattttttaagtttttttttttttttttttttaaattttttgattttttttttttatttattttttttttttgtttgtatatttttttttttatttgtagtttttattttttttttttttttagtttttttttttttttttattttatttagtttatttttttttttttgtattttttttattttttttttatatttgtttttttttatttttgagagtggggatggggatattggtatgggatttttggaagggtttttgtggggagtatagttttttttttttttttgagtgaatagagtttaggttggggtatgggaggggagttatgaattttttggaatttggatttggagattgatgattatttattttttttgtttttgtgggtattattttggggtttttgaggatttttaggagttttaatagtaggtagattttttaattttagggagttttttttttttgatttaggtttaattttaggtagatttttttttttaggtagatttttttttttaggtagatttttttttttgggtggatttttttttttgggtgaattttttttattgggtagattttttttgtttagtgggttattttttttagaagagtttttttttaagggggaatttttttgtatttggggtaatttttggggatggataggtattagaagtagtagtgatagtagtagttgtatagtgaggtttggagtaggggttgggattaatagagggagttaggggttggggtataggggagttatgtggttgattgtggggtgttttagtatatggtgtgtatgggttgtatgtgtattggaaatgagagttgggtgggggaggagtaagtttggaggggagtaggttgatttatagagtgtttttttgtagagatggagttaaagttttataggtttgtttggttttgtgtttttttttttatattaaagttaggatgggggtggagtgaggggtaggtgtgtgtataggtagaaggttattggggttatggatttagtttggaatttaaggtattatttggtattatgtaggttttttttggtattatttagttgtttgttagttagttttagttaattttggtttgttttttagttttaggtatagaaggggaaaggtaggggagttggggtttttatgttttttggttgagagggaaagtagtttatgtatatatttttgattttattaggaagtaggtaaagaggtagggtaggttgttaggggagtttgagggtgagttaagtaatgggtatgtgggagataaatttgagtttgaatgaaaagtaagtgtatgtgttagaggggttttgataggtttaatttatatttattttttaatatattatttttttgtttaaaagtttttattggttttttattgtttgttatgatatgtatattgtgtatttttgatttttaattttttttaaaattttgtttaagagatttttttattttgttttttattatttttttttatattttagttaaattaaattattatttttttttttaaattttttattatttttgttaatttagtttttgttttttgaaatgttatttattattgtatttaataaatatttatttagtattattataggtttagtattgggttatggattagggatatggaaatgaataagatatggttttttattttgggaggttgaggtgggtggattgtttgagtttaggagtttgagattagtttgggtaatatggttaaattttgtttttattagaaatataaaaaaattagttaggtgtaatggtatgtgtttgtagttttagttatttaggaggttgaaatgggatgatggtttgagttgaggtggttgaggttgtagtgagttgagattgtattattgtattttggtttgggtgatagagtaagattttgttttaaaaaagaaaaataaaaataaaaataaaaaatgttatttgttttgagtagtttataatttagtgagtgagggtaaattttgttaatattattatattgagggaagagagatgaattttgttttagaagataatatagaagtaggtaaatttgattatgtttttgaagaaatattagttttattggtaaaaataatagggagaatgatattttgggtaaagggaaggtataaaatattatgagtaggagagtgatagaatttagtttttatattaggttatgttgagggtttgagggttagtatggagtatagattgtaggggaagattgggtgtaaggagatggggtagaagagtgtgaggatattaagaatgggtttaggttttttagtttttttttttttttttttttttttttttttttttttttttttttttttttttgagatagagttgtattttgttatttaggttggagtgaagtggtgtgattttggtttattgtaatttttattttttaggtttaagtgatttttttgttttagttttttgggtagttgggattataggtatttgttattatgtttagttaatttttgtatttttggtagagattggggttttgttatgttggttaggtttgttttgaatttttgattttaggtgatttgtttgttttggttttttaaagtgttgggattataggttggtttttttttttaattaattatttttaaaatttattttagagatgggattttattgtgttgtttaggttggagggtggtggttatttataggtgtgattttgttattgattagtattgagttttgatttgttttaatttttatttgggttagtttaattatttttaggtaattaggttgatgtagaatttagtgtagatatttgattggtatattatattatagtttagaaattttgggattaagtgatttttttgttttagttttttaagtagttgggattataggtatatgttattatatttggttagtttgtttttttaataatttattaagtttttgttagttttttaggtgttgttttaggttttatagatgtagtattgaatagagaatagttttattgttttgtagtttatattttagtaaggttttattggtttaaataaattaaaagagaataaggttattttaggtttatatttagggttaatatttagtaggtatttattaatatggttgtgtaggttaattaaatatattaagatatttttaattttgttggtatatagttatggtttttagttttagggtatttttgttattttagtttttttttagggattttttagattttttgattttttatttaaagaggtattttttggtataatagagtttttaggagtttatttgagtgttttagttatttttaattttgataggttagtgtttgtgtatttgttgttgtgttataaatagttttattggttaggtgtagtggtttatgtttttaatattagtattttgggaggttgaggtgtgtagattatttgaggttaggagtttgagattagtttggttaatatggtgaaattttgtttttattaaaaatataaaaattagttgggtatggtggtaggtatttgtaattttagttatttaggaggttgaggtaggagaattatttgaatttgggaggtagaggttgtagtgagttgagattgtgttattgtattttagtttgattgatagagtgagattttgttttaaaaataaataaatagataaaaattgttgttaatatagtgaaattttgtttttattgaaaaaaaaaaaaaaaaaaaattagttgggtgtggtggtggttgtttgtagttttagttatttaggaggttgaggtaggagaatggtgtgaatttaggaggtaaagtttgtagtaagttaagattgtgttattgtattttagtttgggtgataaagtgagattgttttaaaaaaaaaaaaaaattttattgttttttttgtttaattttttttgttttttgaaatttagatgaaaggttattttttttaggaaattttttaattaattttttattattagtttggaaaagatttttggtatttttgagttaatttagttttttgtttgtttttaataataattttgtttattgtttaatttatataagggtgataatttattttatttgttttaatggtttttagttttataagggtagggtttgtatttgattgagttagttttttatttaatagttatattgagtttttggtttatttttgtaatattagtattttggaggttaaggtagtaggaggattgtttgaggttaggagtttaaaattagtttgagtaatatagtgagattttttatttttattaaaaaataaataaaaatagtagataggtttgatgatataagtgtgtagttttagttatttgggagattgaggtgggaggattatttgagtttaggagttggaggttgtagggagttatgattatgttattgtattttagtttgggtgatagatggagagattttgtttttatagtagatgtataaatattattgttttataattgtttatagtatttagtatggtaatatgttgtaagtattggggtttaggagtattaggttatattatgtagtttagatgggtaataggttatattatttaggtttgtgaaaatatattttatgatgtttgtataatgataaaattgtttagtgatttattttttagaatatatttttgttgttaagtaatgtatggttgtttttatgttgatatgattatatttataaagtttaaggaaagaaaatatttattgagtttattttttggtttttattatttattttataattgttattgagaataattttgttatataaagaatgtttaaatttgttttaattttatttatttatttatttgagatggagtttttttttgttgtttagattagattgtagtggtataattttggtttatttgtttaggttggagagaagtggtgtgtttggttataaagtatttttttaaatgatttatttgaaaaataaaattttgttttaggtatggtggtttatgtttgtaattttagtatgttgggagggtgaggtaagaggattgtttgagtttaggagtttaagaatagtttgggtaatatggtaaaattttgtttttattaaaaatataaaaaattagttaggtgtgatggtgtatgtttgtggttttagttatttgagaggttgaggtgggaggattgtttgagtttaggaggtagaggttttagtgagttaagattaagtttttgtattttagtttgggtaatagagtgagattttgttttttatttttaaaaaaagaaagaaaataagaaaaatttgggtttgggtatggtggtttatgtttgtaattttagtattttgggatgttgaggtgggtggattatttgaggttaggagtttgagagtagtttggttaatatggtgaaatttttttgtttttattaaaattataaaaattagttaggtgtggtggtggtatatgtttgtaattttagttatttgggaggttgaggtaggggaattatttgaatttgtgaggtgaaggttgtagttagttgagattgtattattgtattttagtttgggtgatagagtaagattttgttttaaaaaaaaaaaaaaaatttgtttttttgaattgtatttgattggattttttatttatgtataattttgt

SEQ ID NO: 325 - DNA, 6565 bp, Artificial Sequence
  chemically treated genomic DNA (Homo sapiens)
tgatttttaaattttataagggttattgtagttttttgaagtagaaaatgtagtttattttttgttagtttatgggttatattttgatttaagtatttttatggtgggtatttgtgtttattttgtagtttttgttagagattatgttagaagatggtggtatataggttgagtaagaggtggtgaggttgattggggtttattgattatagaataggtttttttagagggatatgaagtattgttaggttttttgagttttaagttgtggtttgtagtgttttggtgagtagttttgttaatttaattgttgaggtttagggttaagtatagtggggtatttaattttagtttgggttttagttattgtgtgtttagatgtgttaaagttatttttgtagtttattttgtattaattggagttttttataatttaggtgaattttagttttattgaggggaattgatttaaaatattttttatgttggtttttattgatttgggttaattgtgtgattgtggtggttggtatgaatttgatgaattttagggttagtatagtttagttaaatttttgtttattgttaaaggtttattattgttgttttttgtgggggtgtggttaggttaagtgttttgagttgtgttgttgtgtgtttgatatttgttttttttgattgtggtgatttagagggtgatttattggggtagggatgtttgtatgtgtaattttattaagagttaataggttatgattaaatttatttgtttatggggtggtatgagtttgttgaaatatttttagtgtattgttttgaggaagtaagttatataaattgtatggggtgtttttggggtttggttggtttggggtatggggttagtagtggtgtatatgttgagtaaggtgggtagggagttgtattgatggggttagtagaatgtgagttgagggaggatgatgtgttagttgaggggtgattgttaaaaatgtatttttttttttgttattatgtgaagaaggatgtgtttgtttttttttttattatgattttaaattttttgtggtttttttagttatgaggaattgtgagttaattaaattttttttttgtataaattgtttagttttgggtagttttttataagaatatgagaatggattaatataggtttaattttggttattttttaattttttaagttattggagttgattttttgggtagttttaatatgattattttttttattttttagttattagggtatattaggttttatgaattattgattttaatttttgggttggaggataggaaaatttttagtagaggttaattggagatatttgtttttttttaggatttttagaattattttaatattttgaaatgttttatttttagatattgggtaatgaatgttaagtataaaatattattgggtattgtggttaattaggaataatagagtagaagattatgatttattttagtttattttaaaatttatattttattgtatttagggttgggtttagaaaggggattattatttaattttagtaagttttaaaaaatagttgttttgattttatgtgaaattataggttattgattatattgtataatttatatttgggtttattgaatgatggtttaagataatttgtaaatttgatattatagtgagttatttaatgtttaatgtaattttttaaggtgatgaaattaattatttaggtagtagaataagttattgttatgtagtataaataattgtttattaattttttataattatttttgtgatattaagtagttttattaatagttttttttatataattttattttattatatattgatttttattatgagatatgatttttttgtggtgaatttatgttaaggtatttatttgagttttttgttgagaattaaattaattttattttttaaaggttgattttttttaggaatggagaatttaggtttttttatttataattattagattttgttatttataaaattataaagaaagtttaagtatattttgggaatatatatatatttttatgtattatatataatatgtttttgaataatattgtttttttttaatgttgatgagaaaaataattaatttttggttagggttattgtttgtgtggagtttgtatgttttttttatgtttgtatggggtttttttaggtattttagtttttttttatattttaaagatatgtatattattttttttaaatgtatgtatagtttatatttattttagtgttttttattagaagtgtttttggtttttatttagaagtttggtgatgtttttgtgattagtaatatgttttaggaatttaatttttgtgtatatttagtagtttatggtaaaattggttttgttttatattgttttatttaaagttatagtttttaagaatttatagatgatattgaggattatttatgtgtatagatatgatggatattttgatatttagtggattttttttaaaaaattgaatttaaaagttttattaaaatttatatttattatttattatttaaatttaattatttttttttttggtattatttaatttatatttaatatttagttttaattatttgtaattgtgtatgatatagtaaagattttggggaggttaagatgggtagattatgaggttaggagattgagattattttggttaatatggtgaaattttatttttattaaaaatataaaaaattagttaggtgtggtggtaggtgtttgtagttttagttatttaggaggttgaggtagaagaatggtgtgaatttgggaggtggagtttgtagtgagtgtagattgtattattgtattttagtttgggtgatagagtaagatttttttttaaaaaaaaaaaaaaaaaaagattttgagttaaagtgtttaagttgaatgtattttgttatttataagataaattgtgttaattttttgtggtttattttatttataaaatagagataataatagtttttgtttttagggttgttgtgggaattaaagatttagaataatgtttagtttttaattagtgttgttataattgtttgatataattgtattatatttgtgtattttgtagattgatattaaattatatttttaaaaataggtgtttaatgttttatttaattattttaaaatatgtttaattatgtttttattttatttttataatatttttataaaaattttttatatatagtgtttatttttggtttagttttttaggaaaataattttgagagttagttatttgaattaaagaaatattaatattattagattatattgggatttttgagattggtttttattaattttttagttatgggtttttgttattatttttattagtgatttaagtgttaaatttaaatgttttgtatttgttttattaaagagatgtagtatttgttttttttttattgtttttattttttttgttatgtttttttttataattataaatatttaggttttttaggttttaaatggggtattttttaatttttatatttttttttttggttatttttttttttttaatagtttaatttatttagatttttatgtttgaaattattttagatgttttagaggtgttttattattataatggtatattattttttatttttttatatgttatgttagtttttaaattgaaaatttgagtgtttatttttggtgtattatttttaaattttagatttttaaaatttagggttatgtaattttaaaaaatttttatttttttttttttattgtttttgtttaggttttattttttttagtagttgttttaaaggtttattttgttttttttttggagtgttaatttttattgaagtttttatttagttgttaattttgttttatgtttgataatttgtttgtgtgttgatatatataaaatttttaagataaaaattttttaataatggtaaatgaattttgggaattgtatatagattatatagatttataataagagaaaaggttttagattaatatggaaaattttttatttaattaatatttgtattggtaaattttattaagtaagattttatttaattttatattattttttattgaagaggttgtggttattttttggaaatatttgaatttatttttataagttagagaaatagtgttatttgaaatattattttttgggtttgagttttaaggtatttgataaatggagtgttgtgggtaggggtgaggtgttttttttagggttgggattttgttttgggtgagggtgttgtagggtaaagattttattgggtagtagaatttgggtagaaattagtaattgggttttttgtgtagtagaaaaggggaatttagttggggtttattttttttgttagtgtagattgtaagtttggttttatttttttgttgggagttggtttggtgtgttttgtttaggtattttgattgtgggtagtttgtgtttgtttgggttttattgttttggtttggtagatatttgagtggtggttagggtaggtttttgtttttgttgatgtttatgttttgggatatagtgatgatgtagtttagtgaattaattatgatagtagtgggaggatttttgagtttgtttgttatagtagaatgtgtggttaagtttggtgtgaaattgtggttgttttgtttttttgtttttatttgtgtaggtgaggttttgtttttttgttttggtgtatgtagggttgtggtgtgtttgtgtttgtagatgtttgggaattgtggttgtgggtttgtgttttttgttgggttttgttgttgggttgttatttttgttttgttatgttttgttggaagtttgtgttgggtggttttgttgtttttagtttagtttttgtgaggtaagtggttttgagttgatttttttagtttatgggaagtttgaaatttatttttttttttataggtgtagttgattaggtggattttggtgttgtagtggttgtagtgtttttagtgtttgtttttttgttttagttgttgttgtatgtagtaggttttgtttgggattgggtagggttattggggttgggggggtggggtttgtgggtaaggtgggtggaggtgtggattttttgtttgatgatagggttggaggaggaaggggtgggttgaagaaggggaaggtgggaagagtttagttggggttataaattgggtgaagtgttgaggttttagtatttttgtttgaggagataggtaaaggttatgtaggtttttaatggtaggtttgagataggaatttaggttttttgatttttattttgatgagggggtttgtgggtaaggggtgtgttttttaatttttattttttttttttttttttggtggttgaagagttttattgattttttaaaaaagtgttggattgggtgattagaagaaagttgtttttaggtttttagtttttaagattgtaatagtatggtttaatatttgaaattattatggttaaaagtagttatattgtgtagttttttagtgaatattttttgtagtttagattataaagtttgaaatatagtttgggtggataaagttttttaggatggtatagatgtgattaattatggagttttttttgttgttgttttttaatgtaataagtatgtttgtttgtttttaaattagagatattgttataggaaaagtttaagggtgattttttatttgggttatttgtatagtattttttagattgaggttgtggaagggtattgaagattggtgtttagttatttattgtgttttaatgtaggtggtagtttgggtgttttaaaattttgttttttttgtatatattttttttttaaaatgattattttttttttgttttttttgaggatgagttatgtttttatgaatttattaaaattttgtatttattatttaaagggtagttggtgaaggatttatgtatgtttttggtaagttttttgttaagaaaaaatttataattttgttatatttttagtgatgaatataaattttttaaataggaaatatttaaattgtaatgaatatgttaaaaatgatattgtttttttattatttatttttttttttttgtgtttttgttatataattgtttattttttagaggtattttatttagtatatgtaagtagggtgatttaagttttataattagagaaagttgaaggtttattgaattaagattggtagtagttttggttttaattaattttaaatatggtttgagttgttgaggtttttgattattagattttattttgttttttatggtgttaaaaatagtttatttatagggttttttagagttaaaagtagaggattttttgaagagtggatggtaaggaattttgttatttagttgtaaagtttaaattggtttatatatgttaggtttttttagagtagagataatatattattttttaatttttttgatatagg

SEQ ID NO: 326 - DNA, 6565 bp, Artificial Sequence
  chemically treated genomic DNA (Homo sapiens)
tttatattgggaaggttagaaaatgatgtgttatttttattttgagaaggtttgatgtatgtgaattaatttaaattttataattgaatgataaggttttttgttatttattttttaaagaattttttatttttagttttggaaaattttatgggtgaattgtttttaatattataaaagataaggtagagtttgatagttaggagttttagtaatttaagttgtgtttagaattaattgaaattaaggttgttattggttttgatttaatgagtttttagttttttttaattataaaatttgaattattttatttatatatgttaaataaaatatttttaagaaataaatagttatgtagtaaaggtatagaggggaaaagataggtaataaaagaatagtattatttttgatatgtttattgtaatttaagtgttttttgtttaaaaggtttatgtttattattaaagatgtgataagattatgaatttttttttggtagaaaatttgttaaaagtatatataagttttttattagttattttttaaatggtgggtgtaaaattttggtgaatttatgaaaatgtagtttgtttttaaaaaaaatagaagaggagtaattattttaagggagaaatatatatgaaaggaataagattttgaagtatttaagttgttatttatattaaaatatggtaggtggttaaatattagtttttaatgtttttttatagttttagtttgaaaaatattgtgtaggtgatttaagtgaggggttatttttgggttttttttgtggtagtatttttggtttaaaaataaataaatgtatttattgtgttgaaggatggtaataggaaggattttatgattagttatatttatattattttaagaaattttatttatttaaattgtattttagattttataatttaaattataaaaagtgtttattggggaattgtataatatgattgtttttaattgtagtgattttaaatattgagttatgttgttgtagttttaaaaattggagatttaagggtagtttttttttagttatttaatttagtatttttttaaaaaattagtaaaattttttgattattaaggaaaaaaaaaaaggatggaggttaaaagatgtattttttgtttataagtttttttattagaatgggagttaggagatttgagtttttgttttaggtttgttattaaaaatttgtataatttttgtttatttttttaaatggaagtattaaaattttagtgttttatttaatttgtagttttggttgggttttttttattttttttttttttagtttgttttttttttttttagttttattattgggtggagggtttatgtttttgtttgttttatttataagttttgtttttttagttttgatggttttgtttagttttagatagaatttattatgtgtggtggtagttggggtgggaaggtgggtgttgggggtgttgtggttgttgtagtgttagggtttatttggttggttgtatttgtggaggaggaggtggattttaggttttttgtagattggaagaattggtttaaaattgtttgttttgtaggggttgagttggaggtagtgaggttgtttgatgtaggtttttggtgagatatggtagggtaaggatggtagtttggtggtagggtttggtgaggagtgtgaatttgtggttgtagtttttaggtgtttgtgggtgtgagtatgttgtgattttgtgtgtgttggggtgggggggtggggttttgtttgtataaatagggatgagggggtggggtggttataattttgtgttaaatttgattgtgtgttttgttgtaatgagtgggtttggaggtttttttgttgttgttatggttggtttgttaaattgtattgttgttgtgttttagaatatgggtattggtaagaatggggatttgttttggttattgtttaggtatttgttgggttggggtgatgggatttaaatgggtgtaggttgtttatggttggggtatttgggtgggatgtgttaggttgatttttggtgagaggatggggttagatttgtggtttgtgttggtaggaagggtgggttttgattggattttttttttttgttgtgtgggaggtttagttgttgatttttgtttggattttgttgtttggtgaggtttttgttttgtggtgtttttgtttagggtaaagttttagttttggagaaaatattttatttttatttatagtgttttgtttgttaggtgttttagagtttgagtttaagggataatgttttgagtaatgttgtttttttaatttgtaggaatgaatttagatatttttagagaatgattataatttttttagtagaaggtaatgtgggattaagtagggttttgtttgatgaagtttattagtgtaaatgttagttaaatggaaagttttttgtgttaatttgggatttttttttttattatggatttgtatgatttgtatgtagtttttaaggtttatttattattattaaaaaatttttgttttagaaattttatgtatgttaatgtatgagtaaattattaggtatggggtagaattggtaattgggtggaggttttggtggaggttagtattttgaaaggaaaatagagtaggtttttggaatagttgttggaagagataaggtttgaataagggtagtggagaagagagggtaaaaattttttaaggttatatgattttggattttggagatttggaatttaaaggtgatgtattagggatgaatgtttagatttttagtttgaaagttggtgtgatatgtaaaggagtggagaataatgtattattgtaatgatgaggtgtttttaggatatttaggataattttaggtgtggggatttaggtgaattgaattgttggagggaagggaataattaaggaaaagaatgtgggggttgagagatgttttgtttaaaatttaagagatttggatatttatggttgtaagaggaggtatggtagaggaaatggaaatagtaagaaaggagtagatgttgtatttttttaatgggatagatataaggtatttgggtttgatatttaggttattggtagagatgatgataagagtttgtagttaaagaattgataaaagttagttttaaaaattttaatatagtttggtaatgttaatgtttttttggtttagatagttgatttttaaagttatttttttaagaaattgaattaaaagtggatgttatatgtaaaaagtttttatagaagtgttataagagtaggatagagatataattaaatatgttttaaggtaattgagtggaatattaagtatttatttttaaaagtatgatttaatattaatttataaagtatataaatataatataattgtattagatagttgtgatagtattgattagaggttgaatattattttaagtttttaatttttataataattttagaagtaggaattattgttatttttattttatagataaagtaaattataaggggttaatatgatttgttttgtggatgataaaatgtatttaatttgagtattttgatttagaatttttttttttttttttttttaagagggagttttgttttgttgtttaggttggagtgtagtggtgtgatttatgtttattgtaagttttgttttttgggtttatattatttttttgttttagttttttgagtagttgggattatagatgtttgttattatatttggttaattttttgtatttttagtagagatggggttttattgtgttagttaggatggttttgattttttgattttgtgatttgtttattttggtttttttagaatttttattatgttatatataattgtaaatgattaaaattaaatattggatataaattggataatgttaaagggaaaaatagttagatttaggtaatgagtgataagtatgaattttggtaagatttttaagtttagttttttaaaggagatttattaaatgttaggatgtttattatatttatgtatatagatagtttttaatgttatttgtgagtttttggaaattgtgattttaagtgaaataatgtagagtaaaattaattttattataggttattggatgtatataagagttaagtttttagggtatattgttggttataaaaatattattaaatttttaaatgaaggttaaaaatatttttaatagaaaatattgaagtaaatatgagttatatatatatttaagaagaataatgtgtatgtttttgggatgtggaaggaaattggaatatttggagaaattttatgtagatatgggaaaagtatgtagattttatatagatggtggttttggttaggaattgattattttttttattaatgttagaagaaaatgatgttatttaaggatatgttgtatataatatatgaaaatatatgtatatttttaaaatatatttaggttttttttgtgattttataggtaatagaatttggtgattatgggtaagaagatttgggttttttatttttgagaagaattgatttttaaagggtagaattaatttagtttttagtagagaatttaagtaagtattttaatataaatttattataagaaaattatgttttatagtggagattagtatatgataaaatgaaattgtataaaaggagttattgatgaagttgtttaatattataaaggtgattatagaaaattaataagtagttatttatattatatgataataatttattttattatttgagtaattgattttattattttgaaaagttatattaaatattaaatagtttattgtggtattagatttgtaagttattttgaattattatttagtaggtttaaatataaattatatagtgtaattaataatttgtagttttatataaagttaaaataattattttttgggatttgttaaaattaagtgatgattttttttttggatttaattttaaatgtaataaaatgtgaattttaggatgggttgaaatgggttataattttttattttgttatttttagttaattataatatttaataatattttgtatttaatatttattatttagtgtttgaaggtaaaatattttaaagtattgaaatggttttagagattttggagagaagtgggtatttttagttagtttttgttaagaatttttttgttttttaatttaggggttggagttagtagtttatgaagtttgatatgttttggtgattggagagtgggaggggtaattatattaagattgtttaggaagttaattttaatggtttgggaggttgaggggtggttagaattggatttgtgttaatttatttttatgtttttataaagaattgtttaagattgggtaatttgtataggaaagaggtttaattgatttatagttttttatggttggggaggttataggaaatttaaaattatggtggaaggggaagtaaatgtatttttttttatatggtggtaggaaggaaagtgtatttttaatagttattttttaattaatatattatttttttttaatttatattttattaattttattaatgtaattttttgtttattttatttaatatatatattgttgttagttttatattttgaattaattaaattttaaagatattttatatggtttatgtagtttatttttttaaagtaatatattgaaaatgttttgataggtttatattattttataaataaataggtttggttgtagtttattagtttttagtaagattatatatgtaagtatttttgttttggtgagttattttttaaattattatgattaaaaggaataagtattaagtatgtagtaatgtagtttaaaatgtttagtttagttatatttttatgggagatagtagtgataaatttttagtaataaatgaaagtttaattaagttatattaattttagggtttgttaagtttgtgttagttattgtggttatatgattaatttaagttaatagaaattggtgtaaagagtgttttagattaattttttttaataaagttaaaatttatttgagttgtaaaaaattttagttgatataaaataaattatgaaagtggttttaatgtatttgaatatataatagttaagatttaaattgggattagatattttattatgtttagttttaaattttaatagttaaattaataaaattgtttgttagaatattatgagttatagtttaaaatttaaaggatttggtggtgttttatatttttttagaggagtttgttttgtaattgataaattttgattaattttattattttttgtttagtttatatattgttattttttagtataatttttgatgaaggttgtaaagtaagtgtaagtatttattgtaaagatgtttaggttaaggtgtagtttatgagttggtaagaaatgggttatattttttattttagaaaattatgataatttttatgaaatttaagggttg

SEQ ID NO: 327 - DNA, 2891 bp, Artificial Sequence
  chemically treated genomic DNA (Homo sapiens)
  unsure (223)..(366): unknown base
  misc_feature (223)..(223): n is a, c, g, or t
  misc_feature (366)..(366): n is a, c, g, or t
ttttttttttttgaattgtttttttttttggaggtggtggagggagagaaaagtttatttaaaatgtttttgggtgagggattaaggatgagaagaatgttttttgttttttatgttgtggaataatataaaataaaaaattttgagggaatatatattatatattaaatatagattattttagggagtaaataaattatgtgtggggttgggtaattagttnaagttgaagtgtaaataaaatgtgaatatatgtttgtgggttatatatagtgtatttttattagtatttagaaaaaattgtgagttagtgaattaggaaattaatgtttggaaggtagttaaattttaattagtttaagattnttttttttttttaaaaaaaggtatggaagtaatatttttttttttttttttgattagaattgatgtattttttgtgtatgattgtatttttaataataaaaggggaaagaggatttggaaaggaattaaatgtttggtttgtttggggaggaaagagttaatggttttttttataagggtttttgttgatttttttggtttggtttataagttttttatttgttttttttaggaagtttggttttgtggtttgggtattttttgttttttttatatttttttgtttagtatttttgattttttttaaatttggtagtttgagattgttgtaaattggtgttatagggtgtaaaggggatttgttttttttgaaatttggttgagaaattgggaattttgtgtgggaggtgtgggggtgggatggtggggtatagattggtagagagtaggtaattttttttttgttttagtttagttttggaataggtagatatattttagggttaaatagatgttttttgtatggggttttatggaagtttgagtaggtggggtaggagggttggtatttgttgttttggtagtaaattgggggatttagtttgggtggaaggtatttaatttagatagttgtgtatatataatgtataatatatgattttttttaataaatgtaatgggagtttatttataatgtgttttttaagtatatgtggtaatgtgttgttgggttattttaattattttaggtattgtttttttttttatgtttttattatttttttttatttatattaatattttatgttttgaatgtgtgtttattaatattttttttttttttattttttttgggatttttgattaaagtgtggttttttttttagttttagtgaggtgttttgtagtttggtatgtgtgtggtgtggtggtgggtgtgtagtgtgtttttggtgtggagggtagttgttttgtttgtgatgatttatatttataggataaggatgtggtttgttaaatagtattgttatggaggagtagtagagaaagggagagggtttgagagggagtaaaagaaaatggtaggtgtgtgtagttaatttatgtggtttttttattttgtttatattttagagttagagtgtttggttgtttggttgagttttttttttattttttttattttttttattttttttataagtgttttttttgggtttttaaagtagagggtgtgggggaaaagaaaaaagatttttttttgttaatttttgtttattggttttttataatgtgagggtttggatggttgaggatttttgagttgtgttgtttgtggttgttattgttgggttttggttgtttttggttttttttttgttttgagaagggtagggttttttagaggtttggtgggaaaaagaatggagggagggattgtgttgagtataaaagttggtttttggggttttatttaatttgttgtagtaattttagtgagaggtagagggagtgagtgggtggttggttagggtggaagagttgggtgagtagagttgtgttgtgggtgttttgggaagggagatttggagtgaatagggggttttgtttttggtttagtttttttgttgattttttaattagtggtttgtaatttttgttgtatttatgaaattttgtttatagtagtgggtggatattttgtattggaatttataatatttgagtaaagatgtgatttttttgatgtggggaggttattttgtttatttggggatatttttttgttgttgttaggatttgtttttttgaaaggttttttttgtagttgtttagatgttggattttttttgggtggaaaattaggtaagtattgaagtttatttgttttttaatttatttttttattattttaatgttgagatgagttgaatgtttaaatagggtgtttttttttttatttttgtgttattgatattttttttagagtagttatggtaattggggttggggtggggggtaatttagaattggattggggtaaagtgatttgttaagatggtagaggagaaggtagagggaaaatgggaatggtttttaagattatttttttgagatttttgttttatgaatatatttatgttgatttttggttggttggatatttttgttttattgtgttaattgttttttgtgttttggggggttgggggttgttttgtggtgggtagaaagttttttgtattttgagttttttggagtagggattgtatattgtttgtgtgagttagattgttttgtagttgttgatttgtttttgtttttgggagggtatttaaattttggtttattgtatttttgatagttggagatggatattgtggtgtgttttgtttgtttgtttttgtggtgattgtaatttgttttgatttttttaagaagttggtatttggttttttaaaaaataataatataatttaaaatttgggtttttagaggtgttaggatgtggtgttgggtaggtg

SEQ ID NO: 328 - DNA, 2891 bp, Artificial Sequence
  chemically treated genomic DNA (Homo sapiens)
  unsure (2526)..(2669): unknown base
  misc_feature (2526)..(2526): n is a, c, g, or t
  misc_feature (2669)..(2669): n is a, c, g, or t
tgtttatttaatattatgttttaatatttttagagatttaggttttaaattgtattattgttttttaaaaagttaaatgttaattttttaaaaggattagggtgggttgtaattgttgtggggataggtgggtgggatgtgttgtagtgtttgtttttggttgttagaaatgtggtgagttgaaatttaaatgtttttttggagatggggataagttagtggttgtggagtgatttggtttatataggtgatatgtggtttttattttaaggagtttaggatgtaaggggttttttgtttattgtaaagtaatttttagttttttaaaatgtagagagtaattaatataataaagtaggaatgtttgattggttgggagttagtgtgaatatatttataaggtagaaattttgaaagggtagttttaaaaattatttttgttttttttttgtttttttttttgttattttgataagttattttattttgatttagttttggattattttttattttagttttaattattataattattttgagaaaagtgttaatagtgtaggaatgggagaaaagatattttatttaggtatttgatttattttagtattaaagtgataaaaaaataaattaaaaggtaagtggattttggtgtttatttggttttttatttgaaaaaaatttagtgtttaagtagttgtaaggagagttttttagagaagtgggttttggtagtggtggggaagtgtttttaaatgggtagaatagtttttttgtgttgggagagttgtgtttttgtttgggtgttgtaagttttagtgtaaagtgtttgtttgttgttatggataaagttttgtggatgtgataagggttgtggattgttggttgggggattagtgggagggttgggttagaggtgaagttttttatttgttttggatttttttttttaggatgtttatagtgtagttttgtttgtttggtttttttattttagttggttgtttgtttgttttttttgttttttgttggaattattatagtgagttagataaagttttgaaaattggtttttatatttagtgtgatttttttttttgtttttttttttgttaagtttttgagaagttttgttttttttgaggtaggaggggagttagggatggttggggtttggtggtggtggttgtgagtagtatagtttgggggtttttagttgtttagatttttgtattataaagggttggtgggtggagattagtgagagaggattttttttttttttttttatgttttttgttttgggaatttgggaggggtgtttatggggagggtggggagggtggggaaggtggggaggagatttagttgggtagttgagtattttagttttaggatgtaaatagagtaagagagttgtatgaattaattatgtgtgtttattatttttttttgtttttttttaaattttttttttttttttgttgtttttttgtagtagtattgtttgataaattgtatttttgttttgtgagtataaattattgtaggtggaatagttgttttttatattgagaatgtattgtgtgtttattgttatgttatgtgtgtattaggttgtagggtgttttgttaaggttggggaaagggttgtgttttgattaagagttttagggagagtggaggaaagaagggtattaatgggtgtgtgtttagagtgtgggatgttagtgtagatagggaggaatgatagaggtataaggaggaaaatgatgtttagaatgattaaaataatttagtaatgtattgttatgtatatttggagagtgtgttatgaataaatttttattgtatttgttggggggagttatgtattatgtattatgtatgtatagttatttggattggatattttttatttagattgagttttttaatttgttgttaaagtagtagatattggtttttttgttttgtttgtttaggtttttgtggggttttgtgtgggaggtgtttgtttagttttgagatgtgtttgtttgttttagagttgggttagggtgagagggaggttgtttgttttttgttagtttgtattttattgttttatttttatgttttttatatggagtttttaattttttagttaggttttagaagagataaattttttttgtgttttgtggtgttggtttgtaatagttttgggttgttgggtttgggagaaattaaaggtgttagatgggagaatatgggaggggtagggggtatttgaattgtgggattggattttttaaaaggggtaagtggagagtttgtggattgagttgggggagttagtagagatttttgtgaaaaaaattgttaatttttttttttttggataaattggatgtttaatttttttttaggttttttttttttttttattattggaaatgtggttatgtataaaaaatgtattgattttgattaaagaagaggagaggagtattatttttgtgtttttttttggggggggggggnagttttgagttaattaaaatttggttgttttttaggtattaattttttagtttattgatttataattttttttgaatattagtgaaagtgtattgtatgtaatttgtaaatgtgtatttatattttatttatgttttgatttnagttagttgtttagttttatatatgatttgtttgttttttgaaatgatttatatttaatatataatgtatatttttttgggattttttattttgtgttattttatggtatgaaaaataaaaaatattttttttatttttggttttttatttaaaggtattttaagtaaatttttttttttttttattatttttaaaagagaaaataatttgggggaaagggg

SEQ ID NO: 329 - DNA, 1092 bp, Artificial Sequence
  chemically treated genomic DNA (Homo sapiens)
aagttttttttttattatttaagaaggtatttaggtttttttgtgttaggttttaggtaaagtgttggattatttagtaattgggtttagtagtaggatggttttagattgaggttttagggttaaaggattatttttttttttagtgttggtttgggaaaggtaagttttgggtgggagtgtatgttgtgtttttgaagtttggtttttttgttatgtttattttttgtttttattttgtgtttttttaggtttttttttggtgaattggatgttttgttagttttttattttgtgtttttggttgtggtttgggttttttgtaaagttgttgttattttggagggtttagttagtgggtttttggaggttggttgggtaggtgtggtgtgtggtaggagttgggtgtgtatggttattgtgtgtggaggagatattgttttgttgtgatgggggtttggggtgtttttttatgttgtaggtaagtggggtggtggttgtggtatttgtttattgggagttttttttttttttttttgttgttgttgttttgtatttagtttgggggaggatagaagaaaaaggaggtagaatggatttttttggtttttttttgtggttgggggtgggttagggtgggttgtgttgtttaggtagttttgttgtgttgttaggtagtttggttgttggtgtgggtgatgttggtgttggggtgggagttgtgagggtgggaggttttggggtgtttttgggatgtggagttagtagggttttgatttgaaaaatgatggtaaagtgtgtttttgattgtttttgagtattttatattttttagatttagggtgtttttatttttagttggaagtttagtttagagtaatggtgttattaaaaggggtgtgttggatgtgaaaatattttttggaagtatttataagtttgtaggaaatatgttttttttatttttttattttgttttttttattatttattttaagaagtaatagaatttgtgtagagtgtgttttaagttatattgtatgtttatttttgtttatgttgaatttggtgtatatttgtgagaataagttt

SEQ ID NO: 330 - DNA, 1092 bp, Artificial Sequence
  chemically treated genomic DNA (Homo sapiens)
aagtttatttttataagtatatattgagtttaatataaataaaaataaatatatagtgtaatttaaaatatattttgtataggttttgttgttttttgaaatgggtaatgaagggagtagagtaagaaaataaggaaaatatattttttgtaggtttataaatatttttaaagggtatttttatatttaatatattttttttagtggtattattgttttaagttgggtttttagttgggaataaaggtgttttgggtttgaaaggtgtgaggtgtttagaagtagttaagaatatgttttgttgttgttttttaagttagaattttgttaattttatgttttggaaatgttttagggttttttatttttgtggtttttgttttagtgttggtattgtttatgttggtgattaggttgtttagtaatatggtagggttgtttgggtaatgtggtttattttggtttgtttttgattataggggaaggttaaggggatttattttatttttttttttttttgtttttttttgagttggatgtagagtagtagtagtaggagaaggaagggaaagtttttggtgggtaggtattgtagttgttgttttgtttgtttatggtgtgaaggagtgttttgggtttttattgtggtagggtagtgttttttttatgtgtggtagttgtgtgtgtttagtttttattgtgtattatgtttgtttggttagtttttgggagtttgttggttgggttttttgggatggtagtggttttgtgagggatttgggttgtggttgaggatgtagagtaggagattgatagagtatttggtttattgggagaagatttggaaaggtgtgggatgggggtaggaagtgggtgtggtgagggagttaggttttgggggtgtggtgtgtgtttttgtttggagtttgttttttttggattagtgttgaggagaggagtggttttttggttttgggattttaatttgaggttattttgttattgaatttaattattgggtagtttagtattttatttggggtttagtatagaaagatttgaatgtttttttggatgatgaaggggaagttt

SEQ ID NO: 331 - DNA, 5203 bp, Artificial Sequence
  chemically treated genomic DNA (Homo sapiens)
agggaatttaatgtttttttggggtagaagggggtagtgtgtgtgaggtggaaggatagttatttttgttgtataaatttttttgtgggttgtgttgtgtgtgtaggggttggatgttatttggtgttagagttgggtttgaggagtggggtttggttgggaatgagggttgttagtttgggtggtgttatttgttgttttattttttattttttttttttttgtgaggaattagaggtattgggttgtgtgggttgagaatttttaaattttttttggttgtatttggttgagttaatttgtagtttttgttagtttttttgttttttgggtagtggttttttttgttagttaggtttggaagttattttttgtgagattgggttaggaagtgatgaaaagtgttgaattgtttttaaattgaaaatatttttttttttttttttggagatagtgttgataaatatatgggattttggtttttgatttttggttgttgtttttgtttttttgttgttaataaaatttgtattgagttttttagtgttttgattaataggtagattaatttttattggggttgggaatagtttgttttaattaatgttattttaaaagtttgttaggatgtgtttagttttggttttttggatgtttgagtgagttagttatgatatttgttttttttttttttttagttttaaattttttagtaaagtttttagtttttgtttgtttgtttttaggtttataatgggataaattgtaggattgggttgttggtttttagaataggtagtggtttagagaggggatatttagggagaagggattgaggtggttttgatttgtttgttttttttttgaagttgaatttttgttttttgggggtagaggttatagggaaaagagagatggggggattgttatagggtgatgaaatggaaagtaaatttttttaggaattttatttgtaaaaattggagagtgttgttgattttagttgttttatatgttaggagttttaaatttaatttttatttggataatagtatggagggattgggaggtaaagttttgggagtttgatttgttgggttgttaggaatttttttgttgggagattttattggataatgttattttaaaggtattttgggggtgggtagggagaagatagagagagaaagagagagagagagagagagagagagagagagagagagataggttggttttttagagtgaatggaagaggattgaggattgaatttagggagtttttagtattggttatttggtaggaggtgaggaagggtgagggtattgtggtttttttttaagttgagtagtggttatagtttgaaggtgttatggggtggttttgggatttttttggtttttttaggttttgggtttggtgaggttgttgggttagtgggaattggtaggttgttggagaaaggagagggataaaggtttggaagtgggggaggtattagggattgggtggttgggatgggagtttttgtttttagggtttattggatttgtttgttagttttgtggataagggattttatttttttagggtttgtaaaaagagagatgtttggggtattataaagtgatgtaggtgtttgttaagattttttttttttaaaaaatgttagtttttattttttttagtgtgttggtgttgtgtttttgtttgattggggaaagagagagtttggaggtgttagaattgttagaattttggatgggaggtttttggttttgaagttgggagttggaggtatttttttttagaagtgggtatttttttgtttttttgaaggtttgatggggtgggtataggggaatgttagggattggtgtgggtgagatgtttgttttattttatgttgatgtattaatattggttagaagttttgggtaggttttggtgagttatggttttttagtgggattttttttatgtagatagttttgttattgggtgggatgattttggtggtttttgtgggaatgtatttgttggtttgagaggttttttttttggttatagggggtggagggtaggggggaataggggtttgtggggaggtggggaaaggagatagaatttaaagtgtaatttttgttgtttttttgtgttttggagggtagtaagtgggttttgggtgtgttggtagttgtaattaaaatggtgatttgtgagttgttttggttttgtatatatttttggtaattgtgtttgtattttagttttggtttttatatttttaggttgttttgtttttagagttggtatttggtagagggagtgaggttttttatgaggtagaatagtatttttattttttttgagattagtttagagagaatgaggaaattttatttttatttttttttttttaaattttgaaaatttggttttattttggggttgaatttttttttttaaatattgatatatgggaagtagttaagttttttttgttttttgtttgtgtggaggagtttttaggagttttttttggagtttttttttttatttaatgatgttagtggtatttattttttgttttttgttttttttgattttttgttaaaatttttttttgtagtgagatgggggttggaggggtgggagaaggagttgatttaaagagttagtgttttggggggaaatagtaataagattatggttgtttttttttgaggtaaagtttaagaaggtgttaatttatttggttgttaattgagaggttgtaaaaatgatatttgtttttagtttggatagaattattttttttttttttgtttttttgtaagttttttgtttatgtatagtggatttgagttttgagtttaagtttttttaatgtttgtttggaaagtaaaaggagagagaaagagaaagttgatttttgttggtttgggatttagggttgtggttttatttgttggtattttttgaaagttgtgtttttgtgaaatgaaattttgtttaggaggttgtggatttggatatttggtgttattttttttatttttgatttaggtttttttttggtgttgtgagtttttggggaagggttagagttggtagttttttttagtttggggaggggagagggttatgtgattttatttttggttagggttggggaggtttttgttttttgggagttttgtttgggttttttggttgtagggttgttgggttttaggtaggaatgagagggtgaggtttatatgtggtttggtggtttagggtggtttgtagtgtttttattgttttggttgttaggggttgtggtgatgtggttagttagtagtgagtttaggttgtgtagattttattgatgagttttgatttttagtattttttttaagttaagaagagtttagtgtattttttggttgttttattttagtttttttgttttagttttttagttttatttttttttgttttgttttggggtgtgtatagtagtttaggtttttttttttttttttggttttgtggtttgaagttgttgagagagtttgggatagtgtaggattaggtagttgtttgtttttttgttattttaattgtaggttttgaggggtgtttttggagtgtattgaggtgtgttttaattgtgtggtatttaataaatggatttttggtgtgtggttagaagagaaaagttatttatttatttttttttttggttttttggtaatagttgaaggggagttgtttttgtggattgagtagatttaggagagggagttgtggtgtggagatatatgtattatatatagatgattggtggtatatatgatatatgttgatatattgatattgttagtgggatatatatatatatatatatatatatatatatatatatagagagagagagagaattttttttagtattggttatttgtttttttatttaggtttttattttttttttttttttattttttttggttttttttttttttgggtgttgtgaaaagtagttgtatttagttaataaatggtatgtgggagaagttggtgagtgtttggtgaggattttttagggttttttataagaattttttgtatataaagtaagtggtgtgtttatttgggtttttttagttagagttgtgtttttgttttgttgtgtattgtggtttttgaaaggagaaaggagagaagaaagggtggggagagtggggtggaggatttggataggttttggaggtttgggttggggaggtttttggttttgtttagtttttggtttggtaatttttttttggtttaggttttgttgtggtttttgtagttggaatggagttgttaggatttagtgatgtttttgttttttttttttttttttaaggggttaggtgggttggggtgtggttgttgttgtgttttgtgttttggggttttggttgggatggggtgggggtgggtgggggtggggtggtaggttatgttgttttggagttggtaagaaaggatagtatagaaatttgtattttttgaggattgggagttttgagtttagtttagggggagtgggggtgtgatttttaatttagaaatttttatttgattgtttaagtttgtggtagtagggtgggttgtgttgaattttggtgtgtgtggagtggggagatgtaggtgagtgttagagtttgggtttgggggttttgtgttggggagaggagttgggatttattggtggagttgaaaataagtgtatttatatttaaataaatggattaattgtattaggtggggagagggagtatttaattggttggtgtgaggttttggtgttgttttgtataaagtaatattttgtgtgagagtgagtggtgtatttgtatgttgtggagtgattagtgggtttgaaaagggaattgtggtttggttttattttttgttttggtttaggtgtaggaggaagtgttttgttggaggatgatgatagaggttaggttttgttaatgggttagtgaggagtggtggaggtgaggttgggtgttggtatatatatattaatatatttgagttattattaattagtataggtgtgttggttgtagttattttttttatttatattttttattttttattttttagttgttgatagtttattttattgttaatttttgttttttttttagg

SEQ ID NO: 332 - DNA, 5203 bp, Artificial Sequence
  chemically treated genomic DNA (Homo sapiens)
tttgggaaggagatagagattgataataaaatgggttgttagtggttggagagtgagagataaagagtgtgggtgagggaagtggttgtagttagtatatttatgttgattggtgatggtttaagtgtgttaatgtgtgtgtgttggtgtttggttttgtttttattgttttttattggtttattagtgaagtttgatttttgttattattttttagtaaaatatttttttttgtgtttgaattagagtgggaaatgaggttgagttatggttttttttttaaatttattaattattttgtaatatgtaaatgtattgtttgtttttatataaaatattgttttatgtaaagtagtgttggggttttgtgttagttgattggatgttttttttttttgtttggtgtaattggtttgtttgtttgaatatgaatatatttgtttttggttttgttggtgggttttggtttttttttttggtgtagggtttttgagtttgggttttggtgtttgtttgtatttttttgttttgtgtatgttgagatttggtgtggtttgttttgttgttgtgaatttgagtggttaagtgaaggtttttgggttgggggttgtgtttttattttttttaagttggatttgggatttttagtttttggagggtgtaagtttttgtgttgtttttttttgttaattttaggatagtgtggtttgttgttttgtttttgtttgtttttattttattttagttggggttttaagatatagagtatagtggtggttgtattttagtttatttggttttttggaagaagaggaaaggggtgggagtgttattgggttttggtagttttattttagttgtggaggttgtggtgaagtttaggttgagaggaggttgttgggttgagaattaaatgaggttagaggtttttttagtttaagtttttagggtttgtttaaattttttattttgttttttttgttttttttttttttttttttttttttggaagttgtggtgtgtagtggagtagaggtatagttttggttggagaggtttgagtaaatatgttatttattttgtgtatagagggtttttgtgaaaagttttgaagagtttttattaaatatttattaattttttttatgtgttatttgttgattaagtgtggttgttttttgtagtgtttgagaggaggggaagttaggggagataagaggggagggggagtggaagtttgggtgggggggtggatgattaatgttgggagggattttttttttttttttgtgtgtgtgtgtgtgtgtgtgtgtgtgtgtgtgtgtgttttattggtgatgttggtatgttagtgtgtgttgtgtgtgttattggttatttgtgtgtggtgtgtgtgtttttgtattatgatttttttttttgggtttgtttagtttatggaggtagtttttttttagttgttgttagaaaattggggaggaaagtaagtaaatggttttttttttttgattatatattagaagtttatttgttgaatgttgtatgattaggatatattttagtatattttaaaggtgttttttggagtttgtagttaaggtgataggagagtgagtggttgtttggttttgtgttgttttgagtttttttggtggttttgggttatggagttgggaaggagaaggaaggtttgggttgttgtatatattttaggatagggtgagggggaatagggttgaagagttgaggtagggaggttgaaatgaagtagttgaagggtatgttagattttttttgatttagggaaagtgttgaaagttagagtttattaataaaatttgtgtgatttgaatttgttgttgattggttgtgttgttgtagtttttggtagttgggatagtgaggatgttgtaagttgttttgggttgttgggttatatgtgggttttatttttttgtttttgtttgggatttagtagttttgtgattaaggagtttgggtagggtttttgggaagtaaaggtttttttggttttagttagaggtggggttgtataatttttttttttttttgggttggggagggttgttggttttaatttttttttgggagtttgtagtgttgggaggaaatttgggttagaggtgaaggaggtggtgttgggtgtttaggtttgtggttttttgggtgaggttttattttgtaggagtgtgatttttggaggatgttggtaagtggggttgtggttttgagttttagattagtgaaagttggttttttttttttttttttttttattttttaagtgagtattaaagaagtttggatttaagatttaagtttgttgtgtatgagtgagggatttgtgggggggtgggggggggggaagtgattttgtttgaattggaggtgagtattatttttataattttttaattagtgattgagtggattagtatttttttaagttttgttttggaaagaagtagttgtaattttgttgttatttttttttagggtattggttttttgaattagtttttttttttatttttttaatttttattttgttgtggagaaaagttttaataaaaaattagaaaaggtaaggagtgaggagtgaatgttattgatgttattgggtggggaagggggttttgggaaagatttttggaaatttttttgtataaataaaaaataaaaaggatttggttgttttttatgtgttaatatttggggaggggagtttaattttagaatgaggttgagtttttaaagtttaaggagagaggggtgagagtgagatttttttgttttttttggattggttttaaggaaggtgggggtgttgttttattttgtggggagttttattttttttgttaagtattggttttgggggtgaagtggtttaggggtgtgggggttgagattgaggtgtgggtgtggttgttagaggtgtgtataaaattgagataatttgtaggttgttattttaattgtggttattaatatgtttgaggtttatttgttgttttttaagatgtgggggggtggtggggattgtgttttaggttttgttttttttttttgtttttttataggtttttgtttttttttattttttgttttttgtggttagagggaggattttttaggttggtgggtgtgtttttgtgggggttgttggggttgttttatttggtagtggggttgtttgtgtggagggagttttgttgggggattgtggtttgttagagtttgtttagagtttttagttagtattgatgtgttaatatgaggtgaggtaagtattttatttgtattgatttttggtatttttttgtgtttattttattaggtttttggggaggtaaagaagtgtttatttttggggggaagtgtttttagtttttagttttagaattaagagttttttatttggagttttgatagttttgatatttttaaattttttttttttttggttaagtagaggtgtagtgttggtgtgttggaaagggtgaagattggtattttttggagaaggaaagttttggtagatatttgtgttattttgtagtgttttaaatgtttttttttttgtagattttgggaaggtgggattttttgtttgtggagttggtaaatgggtttagtgagttttaaaggtaaaggtttttattttggttgtttagtttttggtgttttttttatttttaggtttttgttttttttttttttttagtaatttgttggtttttgttaatttggtagttttgttgagtttagagtttagaaaagttaagaagattttagagttgttttgtggtatttttaggttgtggttattgtttggtttggggggaagttgtggtgtttttgtttttttttgttttttgttaaatggttagtgttaggggttttttgggtttagtttttagtttttttttgtttgttttgggaggttagtttgtttttttttttttttttttttttttttttttttttttttttttttttttgttttttttttgtttatttttaaaatatttttaaaataatattgtttagtggagttttttagtaaagggatttttagtagtttagtgggttagatttttaaggttttgttttttagtttttttatgttgttgtttagataggagttaggtttaaaatttttgatatgtaggataattgaaattagtggtattttttgatttttgtaaatagggtttttagaaaagtttgttttttattttattattttgtgatgatttttttattttttttttttttgtaatttttgtttttaagaggtaagagtttagttttaaaggaaaagtaagtaagttaaggttattttagttttttttttttggatattttttttttaaattgttgtttattttaaaggttaatgatttggttttgtgatttgttttgttgtagatttgggaataggtaggtgggaattgggggttttattgggggatttgaggttggggagggggagggagtaaatgttatggttggtttgtttaagtatttagggaattgaagttaagtgtattttgatgggtttttaaaatgatattgattaggataagttgtttttaattttagtaagagttaatttgtttgttaattaaggtattaaggggtttaatgtgagttttattagtgataggagaatagaggtggtagttagggattaaaagttgggattttatatatttgttagtgttatttttaaaaaaaaaaaaaaaagtatttttaatttgaaaataatttggtgttttttgttattttttaatttagttttatagagggtgatttttaaatttggttagtggggaaaattgttgtttgggggatagaggggttgataggaattgtgggttggtttagttgaatgtggttggggagaatttaagaatttttagtttgtgtggtttgatgtttttgattttttatgagaggaaagggaatgaaaaatgaagtaataaatgatattatttaggttggtagtttttgtttttggttagattttgttttttaggtttggttttggtgttgggtggtgtttagtttttgtatgtgtggtgtggtttgtgggaaagtttgtgtagtgagagtgattgtttttttgttttgtgtgtgttgtttttttttgttttggaggggtgttgggtttttt

SEQ ID NO: 333 - DNA, 8085 bp, Artificial Sequence
  chemically treated genomic DNA (Homo sapiens)
  unsure (2545)..(2545): unknown base
  misc_feature (2545)..(2545): n is a, c, g, or t
gttttatgatttaattattttttaatatttttttttattaagattattatattggtgattgggttttgatatatagatttggggagaatataaatatttatattatagtatttattaatttatttagttattttattgttaggtatttatttagaaaaaatgaaaatatatgtttatataaagatttgtataatatttttatagtagttttatttataatattaaaaaaattggaaataatttagatatttatttatagttaaatggataaataaattatagtatataaataaaaagaataaaaagaattaattattgatatatattataatttagttgaattttaaaataattatgttgagtgagagaaattaaatgaaaaaaagatatattatattatatataattttaagaaataaaatttaatttatttggtatttagatttttatttttatattagttttaaataaaaagttttaaatttttttggataaatggttgattttatgattggggtaggaaatatataagatgagtttgatgagtttgtagtattttgtaatattagaaagtaggaaagtttatatatatatatatatatatataatatagagagtgggttaaggagtataagagttaattgaaaaagtttttagtgttaaaaattggaaaaatttgagtaataaagtatttatgaatttatataaagaaaagattgaataaagaagtaaatgggggagaagaagtaaattttttttatagaattttaaataaattatgtagatattttattttaaaggagggttagtataattttttatttttttatatttttttaagtgatttataatgatttttttttaaagagtatagagtatgtaaagagggaaaaaagagtaattatgtaatggagaaatttgataaatattattttagttaggtgatggagaataatattaatagttataagttatgttgataatatgtattttttatatgatgtaataaatatagtatattatttttttgatttttattttgttaaaatttaaaattttagtttatttatgaggatatattaaattttaatagaagggtattttgtaatatattttattagtatttttaaggattgttaaggttattaaatataaggaaaatttgagaaatttttatagttaagaggagtataagatattataataattaaatgtggtgttttggatggaattttggaaaggaaaaaggatattaagtgaaaatgaagaaaatttaaataaattatgaatattagttaataataatttattagtattagtttattaattgtaataaatgtattttattaatttaaaatgttaatagagaaaattgtataaatgatatatgagtattttttatattatttgtttaatttttttgtaaatttaaaattgttttttaaaagtaaaatttattaataaaatatttaaagtaaatagatttaaaaggtatatgtaaatgtataatttaatgtttaataaattagatataaatatttttaaaaatttaatatttggtgatagaaagtagattagtggtttgttagaaagtggtgattagtattaggggaaggggatgggatagaatagtatgaagggatttaaaaaatggtatgaggaaatttttggaggtaaagggtatgtttattattttagttttataggtttaataataaattatataatttaaatatatgtagtttattatatgataattatattttgataaagtggtttttttttttaaattatagaaaaaatatttttatatttaaatttttttttttaaaaatagtttttaggaatatttgaagttagttttattatatttgaatttaattagtgaattttgtttatttaaagatttatatatttgggaagtttttgtgttaaaaatgttaattatttagtattaaaatttatggaataatggtgatttaggatatgttggatatttttattgttgtttttttattttaagatttttaattttttggaaataatttttttagatattttgataagggaattattataattaattaaaattaagttaaatatagtttgttagatttaaaatgaggttaagtgttaattttatagtagtgattggaaaattaaattatatggtatttgatatttaaaattatatttttaagaaggttgttatttgatgttttgggtttgggttatagtatttaattttataatattgggtaattttgtgttttagtttttttaattatgaaattgggataatagtatttattttgtgagattgttgaaggattatagttaatataggtaaaaggtttataagattatttggtaatgttgttttgattttataaattttatatattgtgtggtattagttattaggaaaatataaataaattagtgagatattattttatatatttggggggttataataaaaaagatagataaaaaatgttgttaaagatgtgaagaaattaggatttttatttattgttggtgnaaatgtaagaagtataattatttgaattatagtttggtagttattttaaagattatatttagagttgttatatgaattagtaattttatttttatgtatatatttaggagaaaggaaaatatatgttgtataaaaatttgtatatgaatgtttattagtaggattttttatggtagttaaaaggtgtaaataatttaaatgtttaataattgatagagatggataaataaaatgtggtttatttatataatgaaatattatttgttaataaaaaggagtgaaggagtgaagtattgatttatgtggaatatggatgaattttgatttaaaatagttaaattataggtataaaaagtatattagtggttgttgggagatttaggtggaaatgtggaataattgttagtgggtattgagattttagagttatatttatgttataaaattaatagtgttgatggttgtataattttgagtatatgaaaaattaatgaattgatattttgagtgagttgtatgatattggaattatattttaataaagtatggtaattgttttaagataggttggaaagagaaagtttgaaaataataataatgatattaataaattagtttatttttttagttttatatatttttgtgtttatatttgtttttgttttatttataatggtttttttgtagttgttatattatattttgttatttgatgtttggtgaatattttatatttgttttttagaattttttttattttttttttatttgtttaatttttatatatttaaaattaattagagtaaattatttattagaataattaattttaaattttagtaatttaatatgataaaggtttgttttttatttatatagtttttttttagatgattgaggggtttaggttttttatttttagtggtttttttattttttggagttttttgtattttttatatatggttgagataaattatgagttattagtatagttagattttgaggttttataagaaaatttgtaaattatttattttgttttgaataaggtatatttaagatgatgttaaaatatttaatggttttgggttaaatatagtttatgattgtgtatttaaaatatatattgtaatatttttttttttttttattgattttatgaatttagtggggatttattttataagtttaaagataattattttttagattaagaatatttagggtaaaaagtattgtttaatatttttattgaggatgttatgatgtagtatattgtataagttggagttaaaggaaattttttttaaagtgttatttattaaaaattggaatatattttttaagataaattgaagtgtggtatataatatttaaatttttattatagatatagaggtgttattattttttatttttaaatttttttgttatgttgaggatatttaagaggagtaggatatgttggttgtagtaggagaaatttgaaagtatttatttttatggaatttataagggagagaattttttattttagtattgtttttgatatatttattattttaaaagataatgtagttaaatgtttttttttgtgttaaatttttataaaattgaaattttaaaatggtgataaaaattttatttttgatagaatttatttatttttttaattagatagggtataatttttaatttgtaaaataaaatgtaatatgtttatgaggttttattttaaagaatttgttattgagagtagtatttagaataatgggtggaaatgttaattttagagttttagattttattggtaattggggtagggaggggttttgggtggggtttttttagaggaggaggtgttgttagaaagttgtttggttagtttatagttgttattaattggggtaagttttgttgtatttgtgtgtgtgggtggtatttttaatgagaattagttttatttgttatttgagtgaaatttataatttgaggtggttagtgtttttgtattattgggatttgagatttttggagatgattgttgtttgtagtatggagttagtagaagtttgattttttttgggaatgggttgtattgagaggtttgattagttttagggttttagtgagggggtagtggaatttagtgagggattgagagttttatagtatgtatgagtttgatgttagagaaaaagttgggagataaaggagttgtgtgttattaaattgttgttgtagttgtagttatttaagtgttggatttgtgagtattttgtgtttttagtttttggatagaagttggagaatttttttggagaattttttgagttaggagatgagattttttaataattattatttttttttgtgttttttatttgttgtttgttgggataaatgatagttatagtttttttgatgataggatggaggttaagggtaggagttgattagtgttgtttttttttgtttttgatttaggaggtggagatttttttggtttagttatatttaatatttatttttttttttttttgtttttatatttttgaaatttttttttttttttttttttttttttttttggagatgggggaggagaaaaggggagtttagttgttatgattgagttgaaggtaaagggtttttgggttttttatgtggtgggtggtttgtttttttttgaggttggatttttattgttgtgttgtttagttgtaggtttgtttttggggagttagattttggatattttgtttgaagttttggttatatttatttttttggatgggttattttttttttggttttgttagggataggatttttttgatgaaaagatgtaggattagtagttgttgttggatgtggagggtgtatattttagagttgaagttataaggggtgttggaggtagtagttttagttttttagaaaaggatagtggattgttggatagtgttttggatattttgttggtgtttttaggttttgggtagagttaatttagtttttttgtttgtgaggttattagtttttggtgtttgtttggttttgaattttttgaagatttattggttgtttttgttatttagtgggtgttgtttttgtttatgagttggtttgggtgtaaggttggagatagttttgggatggtagttgtttataaagtgttgttttggggtttgttattagtttggtagttgttgtttttggtttttgagagtttttattggtttggggttttagtgaagttgtttttgtaggttgttgtggtggaggttgaggaggaggatggttttgagtttgaggagtttgtgggtttgtttttgaagggtaaattttgggttttgggtggtgtggtggttggaggaggagttgtggttgttttgttggggtggtagtaggaggtgttgttttggtttttaaggaagatttttgttttttagtgtttagggttgttttggtggagtaggatgtgttgattgtttgggatgtttttgttggttattatggtgatggattttatttatgtgtttattttgttttttaattatgttttattggtagtttgtatttggtagttgttggaagatgaaagttatgatggtggggttggggttgttagtgtttttgttttgttgtggagtttattttgtgttttgtttattttggttgttgtaggtgatttttttgattgtgtgtatttgtttgatgttgagtttaaggatgatgtgtattttttttatagtgatttttagttgtttgttttaaagataaaggaggaggaggaaggtgtggaggtttttgtgtgttttttgtgtttttattttgtggttggtgttaattttgtagtttttttggattttttgttggggttattgtttttgttgttgttgtgagtgattttatttagatttggggaagtggtggtgatggttgtatttgttagtgttttagttttgtttgtgttttttttggggttgattttggagtgtattttgtataaagtggagggtgtgttgttttagtagggtttgtttgtgttgttgttttgtaaggtgttgggtgtgagtggttgtttgtttttgtgggatggtttgttttttatttttgtttttgttgttgttgttggggtggtttttgtgttttattttgtatttggttttaatgggtttttgtagtttggttattaggttgttgtgtttaaggagggtttgttgtaggtttatttgttttattttaattatttgaggtgagggtttgggatggggtatgtttagtgtgtttgggagtagtggttttgttggtggtggtggttgttaatttttagttttagttttagtgtattgttgtgttttttggggtggttggagagggtgggtagtgggatatagtataggggtagttgtttttttttttttttttttttttttttatttttggggatatgaaggtgggtgtagaatatattatttttggggtgtgtttttttgaaagttgtttttttgtttgttttttaattttttgaattttttagattttgaagtagaattaattttgatttaaaatgtgtagtgttatattaggtttgttgtagtttagtggggtagaaagtgtgtggtgagttgggggttttatgaaatgttttttttttagaagaaggatgtttattaggagtgtttgttttggagaggagttaaggtattgtttttttgggaggggtgggatttgagaggtggttggttagaattgaaagtagtattattttagggatttgaatattttagtggtttagtttttttaagaattttaagattaaaattaagtttatgtgggaaatgtttaaattgtggatttaaatgtttgttattgtattgtattgtttttttattattgtttgttatttattataattttttttatatataggtttaaaaaatattattttgtatattgaagtaatggaatgtaaaaaaagaatgttttgtttggaattttatgttgtgaataggtaaaatagtgttagtgtattggataatattttaaaatgataaatatatatttgtttaagtaagtaatgattatagggttgtgttttaaaaatttaaaattaaaatattgtaaagtattattgaatttttaaagttaaattatatttgttttgatttagtatatagataggaaggatataatattttatttgttaaagattaaattgtttttatataaagagttttgtagaaagatttttttttaattgattttaattttttaggatataatattatatattaattattgtttttttatattggtgttattgatgaatggttaattatttgtaagtatggtgaatttagttatggatagtttattattaagtttagtttgtatgttttttaagtgtatatatatagttttgtttttaaaatttttttttattttgttaatattggtttaagaaatttttagtattagatagtggtgtatttaaaaataaatggagtattttgttttgtattttaagg

SEQ ID NO: 334 - DNA, 8085 bp, Artificial Sequence
  chemically treated genomic DNA (Homo sapiens)
  unsure (5541)..(5541): unknown base
  misc_feature (5541)..(5541): n is a, c, g, or t
ttttgaaatgtaaaataaagtattttatttatttttaagtgtattattatttaatattaaaggttttttaaattagtattaatagggtgaaaggagattttaaaaatagaattgtatatatatatttgaaagatatgtaaattaaatttggtaatagattatttgtaattggatttattatatttgtaaatgattagttatttattagtagtattaatataaaagaataataattagtgtataatattatgttttagaaagttaaagttggttaaaaggaaatttttttataaaattttttatatagaaataatttagtttttgataaatgaaatgttatgttttttttgtttgtatgttgggttaaaataaatatggtttggttttaaaagtttgatggtattttgtaatgttttggttttgagtttttaaaatataattttgtaattattgtttatttaagtaagtatatgtttgttattttaaagtattgtttaatatattgatattgttttgtttatttataatataagattttaaatagagtattttttttttatattttattattttagtatgtaaagtagtgttttttaaatttgtatataaaaaaaattgtagtgaatagtaagtaataataagaaaatggtgtaatgtagtgataggtgtttaaatttatagtttaaatattttttatgtgaatttaattttaattttgagatttttaagaaaattgagttattgaagtgtttaaatttttaagatggtgttgtttttggttttggttggttattttttaagttttattttttttgggggaatggtgttttaatttttttttaagataagtatttttggtaaatgttttttttttaagaaagaagtattttataaagtttttaatttgttgtgtattttttgttttattgggttatagtggatttagtgtgatgttgtatgttttaaattggggttggttttgttttggaatttggaagatttggaaagttaaaaaataaataaaaaaatagtttttagggaggtatgttttaaaaatagtatattttgtgtttatttttgtgtttttaagagtgaggagaggagggaagaagaagggaggtaattgtttttgtgttgtgttttgttgtttattttttttggttgttttggggagtgtagtggtgtgttggggttggggttgagggttggtggttgttgttgttaatggaattgttatttttggatgtgttgggtgtgttttgttttgggtttttattttaggtagttgagatagggtgggtagatttgtggtaggttttttttgagtatggtggtttggtagttgagttgtgggagtttgttgaggttgagtgtagggtagagtgtgggggttgttttggtggtggtggtagaggtggaggtggagggtaggttgttttgtgggagtaggtagttgtttgtgtttggtgttttgtagggtggtggtgtgaatgggttttgttggggtggtgtgttttttgttttgtataggatgtattttagggttgattttgaggaggatgtagatgagattgaggtattggtgggtgtggttgttattgttgtttttttgggtttggatggggttgtttgtggtggtagtgggggtggtggttttaatgggaaatttgggaaggttgtggggttggtattggttataaggtaggaatgtggggagtgtgtggaggtttttgtgttttttttttttttttttatttttagagtgggtggttggaagttgttatagagagggtatgtgttgtttttgggtttggtgttgggtgggtatgtgtagttggggaagttgtttatagtgattggggtggatgaggtatagggtgaattttgtggtggggtaaaggtgttggtagttttggttttgttgttgtaatttttgttttttagtagttgttgagtgtgggttgttaataaggtgtgattgagaggtaggataggtatgtggatgaaatttattattgtggtggttagtggggatgttttggatgattggtgtgttttgttttattagggtgattttgggtgttgagaagtgggaattttttttggggattagggtgatgttttttgttgttgttttggtgggatagttgtggttttttttttagttgttgtgttatttagagtttgaggtttgttttttagaagtggatttgtagattttttggatttagagttatttttttttttaatttttattgtagtggtttgtggagatggttttattggggttttggattagtgagggtttttagaggttgggagtagtagttgttgggttggtgataggttttggggtagtattttatgggtagttgttgttttggagttgtttttaattttgtatttggattggtttatgagtggggataatatttgttgggtggtgggggtagttggtggatttttgggaagtttggggttaaataggtattaagagttggtgattttgtaggtgggagggttgggttggttttgtttgggatttgagggtgttaatagagtgtttaagatattgtttagtagtttgttgtttttttttgggggattagaattgttgtttttagtattttttgtagttttagttttggaatatgtgttttttatgtttgatagtgattgttggttttgtgtttttttgttggaggggttttgtttttggtagggttgagggaagagtagtttgtttagggagataggtatggttgaaattttaggtaaggtgtttgaggtttggttttttgggaatggatttgtggttgggtgatatagtagtggggatttgattttgggggagggtgggttgtttgttatgtggggagtttggggattttttgtttttagtttagttatgatgattggattttttttttttttttttttgtttttagggaggagggaaaagggaaggaggagggggttttgggaatataggggtagagggaggagaaagtgggtgttgaatgtggttggattggagggatttttattttttgggttgggggtgggggagggtggtgttggttagtttttgtttttggtttttattttgttgttaggggaattgtggttgttgtttgttttagtgagtggtaagtggggagtgtaagaaaaagtagtaattgttaggagattttgttttttaatttggggagttttttaagagagttttttaatttttgtttgaggattggagatgtagagtatttataagtttggtatttgagtggttgtggttgtgatggtaatttagtgatatgtggtttttttattttttgattttttttttggtattaaatttgtgtatgttgtgaagtttttagttttttgttgagttttattgtttttttattaaaattttggggttagttggattttttggtatagtttatttttaggaagggttggatttttgttggttttgtattgtgggtgatagttatttttgaagattttagattttagtagtgtgggagtattagttgttttgggttgtagattttatttaaatgataagtgaagttagtttttattgagaatgttatttatatgtataaatataataaggtttattttgattagtgatagttgtggattggttagatagttttttaataatgtttttttttttagggaggttttgtttaaagtttttttttattttaattattggtaggatttgaaattttggagttggtatttttatttgttattttgaatgttatttttaatagtaggttttttgggatggaattttataagtatattatgttttgttttgtaaattaagaattatgttttatttaattggaaaaatgaatagattttattagaagtagaatttttgttattattttaagattttagttttgtaaagatttaatatagaggaagatatttggttatattattttttaaaataataaatgtattaaggatgatattaaaataagaaatttttttttttatgagttttataaaagtgaatgtttttaagttttttttgttgtgattaatatgttttgttttttttgagtatttttagtgtgataaagaaatttgggagtgggagatggtaatatttttgtatttatgatggaagtttggatgttgtgtgttatattttgatttgttttaaggaatgtgttttaatttttagtaaatagtattttaaggaaagttttttttagttttagtttatatagtgtgttatattataatatttttagtagagatgttgaatagtattttttattttaaatatttttagtttgaaaagtaattatttttgagtttataaaatggatttttgttaaatttatgaagttagtagaaaaagggaagaatattgtaatatatattttagatatatagttataaattgtatttgatttaagattattgggtattttaatattattttaaatatattttgtttaaaatagagtgaatgatttgtaaatttttttgtaggattttaaggtttagttgtgttaatgatttatagtttattttaattatgtataaagaatgtagaagattttagaaggtgggggagttattagaggtaaggagtttggattttttgattatttggggaggggttatatgagtgagaaataaatttttattatgttaggttattaggatttggagttggttgttttagtaaatagtttattttgattaattttagatatgtggaagttaggtagatagaggaaaggtaaagagaattttgggaagtaggtatagaatgtttattgggtattaaatggtaggatataatatggtaattgtaaggggattattatgaatagaataggagtaagtgtgggtatagaagtatatgagattagagaagtaaattaatttattaatattattattgttgtttttaggttttttttttttagtttattttaaaatagttattatgttttattgaggtgtaattttagtattatatagtttatttaaagtattagtttattgattttttatgtatttagagttgtgtaattattagtattattaattttgtaatatgagtatgattttaaaattttaatatttattagtagttattttatatttttgtttaaattttttagtagttattaatatgttttttgtatttgtgatttggttattttggattaaggtttatttatgttttatatgaattagtattttatttttttatttttttttattgataaataatattttattgtatggataaattatattttatttatttatttttattagttgttggatatttgggttgtttatattttttggttattatgaaaaattttgttaatgaatatttatgtataagtttttgtgtagtgtatattttttttttttttggatatatgtataggagtggaattgttggtttatatggtaattttaggtgtggtttttggagtaattgttagattatggtttaaatgattgtattttttatatttntattagtagtgaataagggttttagtttttttatatttttgataatattttttatttgttttttttgttatagttttttaagtgtgtgaagtggtattttattgatttatttatatttttttgatggttaatgttatatagtgtatagaatttgtaaaattaggatagtattgttaggtagttttgtaagttttttatttgtgttaattgtaattttttaatagttttataaaataggtattgttattttaattttatagttgggaaaattgaggtataaggttatttagtattataaagttaagtattgtaatttaaatttaagatattaaatgatagtttttttaggagtgtgattttaaatgttagatgttatataatttgattttttggttgttgttgtaaaattggtatttggttttattttaaatttgataaattatatttggtttgattttggttggttataataatttttttgttagaatgtttggggaggttgtttttaaaagattgaaaattttgaagtgggaaaataataataaagatgtttagtatgttttaaattattattattttataaattttgatgttgggtgattagtatttttggtataggaattttttaaatgtatgaatttttgaatgaataaaatttattgattaaatttaggtgtgatggggttaattttaaatatttttgaagattgtttttggagaagaggatttaaatgtggaagtattttttttatagtttggggaaaaaaattattttattaagatatagttgttatataataagttgtatatatttaaattgtataatttgttgttagatttgtgaaattaaaatgataaatatattttttgtttttaaaagtttttttatgttattttttaaatttttttatattgttttgttttattttttttttttagtattaattattattttttggtaagttattaatttgttttttgttattaaatattaggtttttaaaaatatttatatttgatttattaaatattaaattatatatttgtatatgttttttaggtttgtttgttttagatgttttattaatagattttatttttgggaaatgattttggatttatagaaaaattgagtagataatatagagaatgtttatatattatttgtataattttttttgttagtattttaaattaatagggtatatttgttataattaatgaattaatattgataaattgttattaattaatatttatagtttatttagattttttttatttttatttaatgtttttttttttttttaggattttatttaggatattatatttaattgttatgatgttttgtgttttttttggttgtgagagttttttagattttttttgtatttgatgattttgatagtttttaggagtattggtgaggtatattgtaagatgtttttttattgggatttgatgtatttttatgagtagattagggttttgggttttggtggggtggaaattaaagaggtaatgtattgtatttattatattatatgaagggtatatattgttaatatgatttatgattgttaatgttgttttttattatttggttgaagtagtgtttgttaggtttttttattgtatagttatttttttttttttttttgtatattttgtattttttggaaggaaattattatgagttatttaaggaagtgtgggggagtagggagttatgttagtttttttttggagtggagtatttatataatttatttggaattttgtgaggaagatttgtttttttttttttatttatttttttatttagttttttttttgtatggatttatgaatattttgttgtttaaatttttttagtttttggtattgggggtttttttagttgatttttgtgttttttgatttattttttgtattgtgtgtatgtgtgtgtatgtgtggatttttttattttttggtattataagatgttatagatttattagatttattttgtatattttttgttttagttgtagaattagttatttatttaaggaagtttgagattttttatttgaaattggtatagaaatgaagatttgggtgttaaataaattaggttttattttttagaattgtatataatatagtgtattttttttttatttggttttttttatttagtataattattttgagatttagttaaattatagtatgtattaatagttaattttttttattttttttatttatatattatagtttgtttatttatttaattgtggataaatatttgagttgtttttaatttttttggtattataaatagagttattatgaaaatgttgtataagtttttgtatgaatatgtgtttttattttttttgggtaaatatttagtagtgaaatggttggataaattagtaggtgttgtgatatgagtgtttgtgttttttttaaatttgtgtgttaaaatttaattattaatgtgatagttttagtaggaggaggtgttggggagtgattaggttatggagt

SEQ ID NO: 335 - DNA, 7110 bp, Artificial Sequence
  chemically treated genomic DNA (Homo sapiens)
tgttttttgtgatgttttagaggttagaaggatgttttgaaggggaaaattgtaggagttaggtagagtagggttttggtttttttttaatgtttttttatttagataaatttgggttattttgtagaggttgtagtgagttatgattatgttattgtattttagtttgaggaatagagggagattttgttttaaaaaaaaaaaaaaaaaaaaaaaaaaaaaaaaaaaaaattttggtttattttatgaagtatttggtaggtgttttaatattttttggtatatgggaattatttttttttattattggaaggtttaaaaagtaaataatgtgttttatatggttagagttagtattaaggggattaagtagaataattggtagttagtgttagtttggagattaatatagttaaagttgttttgttatgttatgttttttttatttgtattgttttatggtttaagataaaatttttgaatgttatttggatatagtgagtatttggtttgttttattgtttttaggagtaattaatttaatttttatttttttgagaatgatgattttatatagtatatttttttattaagatgtgaaagatgatattatggtatttgaaatagttttaggagagatttgggatatgggaagtttgtagataataatggaaaatttttttttagaatatagttatttgtatgatttatagtagtgttttttggagaatgttttaaaattatttttattgaaagaataataatgtttgttattaggataaatgaaataaggggaaaattttagatttttggaataatgggtttatatttaatttaatgattattatgtttttatattttgtattatttagaaaatagtagttaaatagatagaaatatagaagattgtttaaaaattaaagttattgagttagatttttttttgaaaggttagtgtatgggagatgagaaaggtattatagagattagagtgtttatataaaagatattttagtagatgatttataaagagtatattaagtatttatattatttatattaagttgttggttattttgtttattaaagaaaataagaaagaaatttttttttgatattattttggtgtagtaataatagagttttggaattagttgttagaagtgataattaaagttagtttattatgtttattaattaatttatatagttattttgaagttttatataattgtttttttgttataagtttttatttttttttatggtattttggttttgaatttagataggtaaagaattaagtatggttgggtgtggtggtttatgtttgtaattttagtattttgggaggttgtggtgggtagattatgaggttaggagattgagattattttgattaatatggtgaaattttgtttttattaaattataaaaaattagtttggtatgatggtgtgtgtttgtagttttagttatttgggaggttgaggtaggggaattgtttgaatttgggaggtagaggttgtagtgaattgagattatgttattgtattttagtttgtgagattttgttttaaaaaaaaaaaaaaaaaaagaaaaaaaaaaaaagaattgaagtgtttggagattagtgtattgtaatatttatatagttaagtaggtatttttaattgaattttaaaaaagtattatttttgaaattttttttagtttagatagggttagttatttgggtagaaaggaaaagaaaaataaaaaattggaaaaggatgtattagtattttttttagaaataatttaatattaggaatagaaggaggattttatttattaatttttaataattatttgatgttgttgttgggttggttaaatatttgttaatattgatgatttttttatttattattagagagaagtagagggatttgatgtttagagaagtagtaaaatttattttttattttttttttttagttggatggaagtatttggaggttggttttatattttagtattttagtgttggtgatgtagattatttttgttttagagtaattttgtgttatggaatttaagaggattttgttgtattaggataggaatgtatttttgttttatttgtttttatgaaagtagattttagagatttttagatgttatgagattaattgttatttagggtaggttttaggggagggatagagaagggtagtgttaataatagggattttggagataagattagtaatttaagaaataaatgtgagatattttatttttttttaatttattttttttttaaaagtttatttttattttttttttttttattatgtagtaattgataattaaatatagttttggtttttattatgtaatttagtagaatatttagatattaggaattttttatttttggttatttatataataatgaaatttgtagtttatgttaggttgtgtggatagtatttgtatttttggaaattaattggaggttttttttttatttttttttggttgttttttatttttttttttattgtggtttttgttttttttaagttgattagaattatgtataaaattagtttttaataaatattaatattgaagttttagtaggttgttaatttttgtatagttattttaaatgttgtatataagtgtaaagttttatggagttttagaggtttttaagaatattgtaaatattttaggtttaattagtagttttggagttaggtaatggtttgtggttttttgtgttaggttttttgaggtttttagtttttagaggttgtttgtaattatgatgtgtatatatatagtatttttttttaaatatagtataaattttttttagattttgttaggtatttataattattgaatatatatgtagattgatttttatttttttaaagtttgaaaaataatttagtgttttaatttaggttttgttagatattttttgatttaaattgttgtttgtagttttattttttaagggaaatgaaaaaataataaatttttagattggtgttgatgtttattttttttaagtgggttgattatttgttttgtagatttttgatgggtggggtgtggggtaggagtgtgatttaatttttagtatttttgaattagtttttttatggtgataggttagtttaattggggttgtaaatagatttgataggtttgttttgggttgatggttattgattaggtttttagattagataagttatttggttgagtttatagtaggtggggtgtgtttattagtttaggggtagtgattggatgtttgttgtaatattggagaatgtatgttttgggttgtagtaggagatatttttaagtatagaattaaaagggtttattttaagtggtagggtattagtgatggagaggtttgagagttttagtgtttagtttttttttttatgtttgggaaggtgtagaataggttgatgtagagtaaggagtgagttttaggttttagttttttggtttgtttttagggtagtaggtgaggagtggtattagtttggggattttttttttgtgttttgtaagaattggtggtagttagtaggtggggaggtgggggtatgtgtttggatgtgggtgtttgtgtaattagttttttaagtgttagttttgatagtgtttttttgggaggttggtttgagtttttgtttttgttgtggtgtaggaagggttggggttttgttgtttgtattaggtaagagtattttgagtaaaggaagaagatgatttgtttttggagttattattggggagtgggaatttggaaagttttttaattagggatatatgtgattttttttggaaagtagttttgattgtggtttgtgtatttttttatttttttttgaatttttttaggtttttttgttttgtttatttgttgggttgtagttttttattgttttgtattttttatttaatttggtaattttaaatgtgtatggtttggttggggtgtgtggagtttggttttgggtgatttattttgttgggtttttatggtggttaagggggggtggggttaggtggtttttgagaattgagtttgattttgatgttgtgaattgatttggagtttgaggggaaagatgtttgatttttttgggggtattggagtgggtgtaggagaggtttgtggggtgtgttttatttatagggatttttttttagtttatttagataggtgttttttgggtttttgaaatttaatggttatgtgtttatgtttagtatgtttggttgagagtttttatttttagggtaaatgagttgagttattggggaagtgagaggtggggtgttgtaagggagttggatgaggtgatatatgttggtgatataatagtaggttgttttttgtgttaagattgatattatgaggatatagatttgggggaagggggaatttttaggtaaaggttgttatagttaaatttttgtgaatgattgtgatttgatagtggtgtaaaaggaaagagtgaatgtagtttatgttgtggaaatttaggggtagaggtaaggggggagggtattttttttgtagggattgtttttgtatttttttttatattgagtagtgtggttatttggttttttttatttgtgtataggtaattttagatttgagttagtgatattgtttaatgtatttattttagtttttattattagttttttatttttgttttataatagtttattttgtttttggttgggtttttgggtagaggttgaggtttagtttgttatttttgttttgtgttgttgtaaaagttgtagtaagtgtagttgtaggttggtggttgggaattggtttgagtaagttttaggtagttatattgggtatgtttagtagagtttgtggtttggggattttgtgtttgtatttagagttattgttttgtttttttttattgttttttgttttgttttgttttttttttgtttggtgtggttttgtttgttttttgtttgttttttgtttttttttggttttttgaggtgtttgggtttttggtgtggtggtggagggggtgggtaggttggtgggtggtgatgtggtgggattttttatgtgttgtggtaggatatgtgtttggtgttgggatgtgattgtgtttagttttttttttttggaagttgtagttatgatggaagtttgagagttgagttgttgtgaggtgaggttgggtttaggtgagggagatgagagatggtggtggttgtggtttggagttttttttagtgtttgtgagtagttgtgggggtagtgtttttggggagttggttggtttgtggtggtggtagtggtggtgttttttgttttttttttgttttttttaattgtgtagttttttttttggttttttttgaaagggaaggtggaagttgtgggtttgggtgggagttggttgaggtgtggtggtggtggtggtattttttgtttttggagtgggggggagaagtggtggtggtggtggttgtggtggttgtagttttagggagggggtttgagttgtttgttattatttttagggttgggaatgttggagagttggtttttttttttttattgtttttaatatggtggtggtggtggtggtatatttagggatttgggttggttttaaattttttgtttgttgttgttgtattttttgtggtttgggttttggaggttgttggtggaggtagttgtttggaggattatttgttttttttttattttgttgttgttgttgttaggtttttggttgttgaggagaagtaggtttagttgttgtaattatttagtagttgttgtagtagttattatttggttgtggtttagagttaagtggtggtagagtgaggggtattagttattgttaagtttagagttatttttattttgtagaagaagttttgttattagtagtttttgttatttttttttttttttttttttagttataggtttttagatatgatagttattattaaagagattgttagtagaaataaaaggagatattaagaggatggatttgatttagatttgatttgtatttatttttgtggttgtttttttttatttttttgttatttttttagaatgtgggagtagatggatgtgaaaatgtttgtagtttgggtgattataatatttaattttggttaggttgttaggttatatattttgtgttttttttttgtgtatttaatttagggtgtgtttggttagatggaatttttgtttggttgtaagtgttaagttattgattgtttttttaggttatttatatggtttttttttgagggttattgtttgttaatatagaatatagtatattgttagtggattagtgagtttggtaatttggttttttaaatgaataaaaaagtagatgttttttgaggttgagtatattttgattaaattttggtttaggttttagattaagggtttagattagaataaaatgaaaattagtgttgtatgtatgtatattgtattagaattttgtagtgattgttttagttttttgagttgtattgatagatttttttaaaatatgattgatttgtataattttagaagtagaattatttttagtatatatggtgtatattgagggtaaaaagtagttttgttaatgtttaaatttaagttatttataattttgaattgtatgtagaagttttgtagtttgaagttaatagtgttataatatattttataaggtgtttttattagatttttgttatatttatttttttttttttttatggggtgatgtaggatagtgtttgaaatttgtattttagtagtatttaatgtttagtgtttttgttataaatatagaatggatattgagtagtttttgattttagatggtaatgtgtaggtttaagggtattgtgtgtagtaagtgaagattgtagaaataaaattttagtttatgtttgaaatttaagtattgttgtgatgttagaattgttgtttattgtttttaggttttaggttttttgatattttttggtattgttaattttattgatttg

SEQ ID NO: 336 - DNA, 7110 bp, Artificial Sequence
  chemically treated genomic DNA (Homo sapiens)
taaattagtaaaattaatgatattaaaaggtgttagaggatttgaaatttaaaaatggtgagtagtaattttggtattataataatatttaaattttaagtatgaattgaagttttatttttgtaatttttatttgttatatataatatttttgaatttatatattattatttgggattagaaattatttaatatttattttatgtttatgataagagtattgaatattaaatgttattgaagtgtaaattttaagtattattttatattattttatagggagagaaaaaggtaaatataataaagatttagtaagaatgttttataaggtatattatggtattattgattttaaattataaaatttttatatatagtttaaagttgtaggtaatttaagtttaaatattaataaaattattttttgtttttaatgtgtattatatatattgaaaatgattttgtttttaaagttatgtaaattagttatattttaaaagaatttattaatgtaatttaggaaattaaaataattattgtaagattttgatgtaatatgtgtatgtgtaatattaatttttattttattttgatttaaatttttgatttagggtttaagttaagatttaattgaaatatgtttaattttaaaaagtgtttatttttttgtttatttaggagattggattattgagtttgttaatttattaatagtgtattgtattttgtattaatggataatagtttttaggaagagattatatagatagtttaagaaagtaattggtggtttgatatttgtaattaggtaagagttttgtttagttaaatatattttaggttgaatatatagaaaggaaatataaaatatatgatttagtaatttgattagggttaaatgttatagttatttaaattatggatatttttgtatttgtttatttttatgttttaagagagtgatagaaaggtaaagaggagtagttgtagaaatggatataggttaagtttaagttgaatttatttttttgatatttttttttgtttttgttaatgatttttttgatgatggttgttatgtttgggagtttgtggttgaagaaaaaggaggagagagatggtagaagttgttggtggtggggttttttttgtaggatggaaatggttttggatttggtggtagttgatgttttttgttttgttgttgtttggttttggattgtagttgggtaatggttgttgtggtggttgttggatggttgtagtgattgggtttgtttttttttagtagttagaggtttggtagtggtggtagtggaatggggagaagatgaataattttttgaatggttgtttttgttggtggtttttggagtttgggttatggggggtgtggtggtggtggatgggaggtttaaaattggtttgggtttttggatgtgttgttgttgttgttgttgtgttggaggtagtagaaggggagagattaattttttggtgtttttagttttggaaatggtgataggtgatttagattttttttttggagttgtagttgttgtggttgttgttgttgttgttttttttttttgttttaggagtgggaggtgttgttgttgttgttgtgttttagttggtttttgtttgagtttatggtttttatttttttttttaggagaagttgaggaagaggttgtatggttagaaaagatgaagaggaggtgagaaatgttgttgttgttgttgttgtaggttggttggttttttgagggtgttgtttttgtggttgtttataggtgttgagaggggttttgggttgtggttgttgttgttttttattttttttgtttgagtttggttttgttttatagtggtttaatttttaaatttttattatggttgtagtttttgagaggagagaattgagtgtagttgtgttttagtgttgagtgtgtattttgttgtagtgtataaagagttttgttatattattgtttgttggtttgtttgttttttttgttgttgtgttgggagtttgggtgttttggaagattgaggggaggtgggaggtgagtgagaggtggatgggattgtgttgggtgaggggagggtagggtagggtagggggtggtaggagggggtagagtggtagttttgggtgtgagtgtagagtttttaagttgtaggttttattgagtatgtttagtgtagttgtttggggtttgtttgggttggtttttagttgttagtttgtagttgtatttgttgtggtttttgtagtaatgtgaggtgaggataatgagttaagttttggtttttgtttagaaatttagttggaggtagggtaggttgttgtggggtgggggtggaggattgatgatgaaagttgagatgggtgtgttgagtagtgttattgatttgagtttgaggttatttgtgtataggtgaaaaggattaggtgattatgttgtttagtgtagagggaaatgtagggatggtttttgtaaggggaatattttttttttttgtttttatttttagatttttgtggtgtggattgtatttgttttttttttttgtattgttgttggattataattgtttgtagagatttgattgtaatagtttttgtttagagattttttttttttttaaatttgtgtttttatggtgttagttttagtataaagagtaatttgttattgtgttgttagtgtgtattattttatttggtttttttgtagtgttttattttttgtttttttggtaatttggtttgtttgttttaaaaatgaaagtttttagttgagtgtgttgaatgtgaatatatagttgttgaattttaagggtttaaagggtatttatttaaatgaattgaaagaggatttttgtgagtgggatgtattttgtaggttttttttgtgtttgttttggtgtttttaagagagttgagtatttttttttttgggttttaggttggtttgtggtgttggagttaagtttggtttttagagattatttagttttgtttttttttggttgttgtgaaaatttggtaggatggattgtttggggttaggttttgtgtgttttggttggattgtgtatgtttggggttattgggttgagtggaaagtatggaatggtaggaagttgtagtttagtgagtgggtggggtgaggagatttaggagggtttaaaaggaggtggaaggatatatgggttatagttggaattattttttgaaggaggttatgtgtgtttttagttggggaattttttaaatttttattttttagtgatagttttggaggtaagttgttttttttttttgtttggggtgtttttgtttggtgtaggtagtggaattttaattttttttgtgttgtggtggaaataggggtttggattagttttttgaaggagtgttgttggggttggtgtttggggaattggttatataagtatttatatttaaatatgtgtttttgtttttttgtttgttggttgttgttgatttttatagaatgtggggagagagtttttaaattggtgttattttttgtttgttattttaagagtaagttaaaggattgagatttgagatttattttttgttttatattgatttattttgtgtttttttaaatgtgggaaaaggagttgggtgttagggtttttgggtttttttattgttgatgttttgttgtttagggtgaatttttttggttttgtgtttgagggtattttttgttgtagtttagagtgtgtattttttgatgttgtaataaatgtttagttattatttttgagttggtgagtgtgttttatttattgtggatttagttaagtgatttatttggtttgagaatttagttaatggttgttagtttagaataaatttgttaagtttgtttatagttttgattgggttgatttgttattgtgagagagttgatttggaaatgttgagagttggattgtatttttattttgtattttatttgttaaggatttataaagtaagtagttgatttgtttaaagagaatgagtattaatattagtttgggaatttattgtttttttattttttttaggaagtagaattatagatgataatttgagttaaaaaatatttaatgagatttaggttgaagtattgagttgttttttaaattttgagagaatgagaattaatttgtatgtgtgtttaataattgtaagtgtttagtaaagtttaaagagggtttatgttgtatttgagaaagagtattgtatatgtgtatattatagttgtaggtaatttttgaagattagaaattttaagagatttagtgtagaaagttataggttattatttaattttgggattattaattaaatttgggatatttatagtgtttttagagatttttgaggttttataaaattttgtatttatatatagtatttaagatagttgtgtaggagttaataatttgttgaagttttagtgttgatatttattgaagattggttttgtgtatagttttggttagtttgggaaaggtaaggattatagtggaaaaggaaatggaaagtaattggaaaagagtaagagaaaggtttttagttgatttttagagatgtagatattgtttatatagtttagtgtgaattatagattttattattgtataaataattaaagataaggagtttttgatgtttaggtgttttattagattgtatggtaaaaattagagttgtgtttaattattaattattgtgtggtagaaaaagggaaaatgaagatgaatttttaaaaggggagtagattagggaggggtaaaatgttttatatttgttttttagattgttgattttgtttttagagtttttgttattagtattgtttttttttgttttttttttggagtttattttaagtgataattagttttatagtatttgagaatttttgaaatttgtttttatggaagtaaatgaaataagggtgtatttttgttttggtgtgatagaatttttttggattttatggtatagagttattttggagtagagataatttgtattattagtattaaagtgttagaatatgagattagtttttaagtatttttatttggttgaagaaagaaaatgggaaatgggttttattgtttttttaaatattaggtttttttatttttttttagtggtgaatgaaaggattattaatgttggtagatatttggttagtttaatagtaatattaggtggttattaggagttggtgaataaaattttttttttgtttttagtgttaagttgtttttgaaagaaatattgatgtatttttttttaattttttgtttttttttttttttttatttaaatggttggttttatttaaattaaagaaagttttaaaaatagtatttttttaaagtttagttgaaaatatttgtttggttgtatagatattataatatattggtttttaagtattttagttttttttttttttttttttttttttttttttttttgagatggagttttataggttggagtgtagtggtatgattttggtttattgtaatttttgttttttaggtttaagtaatttttttgttttagttttttgagtagttgggattataggtgtatattattatgttgggttaattttttgtagtttagtaaagatagggttttattatgttggttaggatggttttgattttttgattttgtgatttgtttgttatggttttttaaagtgttgggattataggtgtgagttattgtgtttggttatatttagttttttatttgtttggatttagaattagaatattatagggagaagtagaagtttgtaataaagggataattatataaagttttagggtgattatgtagattgattagtaagtatggtaaattagttttaattattgtttttaatagttgattttaaaattttattgttattatattaaaataatgttgaaagaaaattttttttttattttttttgataagtgaaatgattagtaatttgatgtggatgatataaatatttgatgtgttttttgtaggttatttgttaagatgttttttgtgtaaatattttgatttttatagtgttttttttattttttatatgttgattttttaaaaagggatttaatttaatagttttaatttttaaataattttttgtatttttgtttgtttaattattgttttttaaataatatagaatataaaaatataataattattggattgaatgtaaatttattgttttaagggtttgaggttttttttttattttatttattttaataataaatattattgtttttttaataaagataattttaagatattttttaaaaggtgttattgtgggttatataagtaattatattttaaaagagaattttttattattgtttataagttttttatgttttaaattttttttgaagttattttagatgttatggtgttattttttatattttggtagagagatgtgttgtatgaaattattatttttagagaaataagggttgagttggttgtttttgagaataatagagtagattaggtatttattgtgtttaagtggtgtttagaaattttgttttggattgtggagtaatataaataaaaaagatataatatgataagatagttttgattatgttagtttttaggttaatattagttattaattattttatttggtttttttaatattaattttagttatatggagtatattgtttgttttttagattttttaataatagaaaaaggtaatttttatatattagaaaatattgggatatttattaggtgttttatagagtaggttgaaattttttttttttttttttttttttttttttttttttttgagatggagtttttttttgttttttaggttggagtgtagtgatgtgattatggtttattgtaatttttgtagaatagtttgaatttgtttaggtagagggatattgagaaggagttaaaattttgttttgtttaatttttataatttttttttttaaaatatttttttggtttttaaggtattataaaaaata

SEQ ID NO: 337 - DNA, 6478 bp, Artificial Sequence
  chemically treated genomic DNA (Homo sapiens)
tttattttgaagggatgtttaagaaatattgttaaatttaaaagtgttgtagagtaatatgtattataagattatattggtataatagtaataaatagtatttttttatataattttaaaaaaatatatagatttatgttaagtattagttaagatgtttggtatatggtaggtatttaatatttaatgaatatatgtagaggatttttattttttattttatattttttggataagattttgaatttttatgagtatgtattatttaaatttagatttatagggagtgatggaaaatgtgaaaataaaattttaaaaaggaaaagaaagagtaaagatttagatttaaaaaaggaaatgtaaataagatgaaatagttaaagataggtttttttaaaattaatgttgagataatgttattagtagtgatagttagttaagagatggtttgtagtttattgtttagtattgaggtatttagtaggggttgtatttaatttttaagttggaattaattgaaattgttgggtttgaagagttgtttttatgagttattgatggtagaaagtatagaagtattaaagaaaataatttagaaatgtggaaagagaaaagtatgtttttgttttgggagaataatatttgtgtgtaattaagtaggaagattttgtggaggaaagtttgaaaaagtagagagttgaagagaaaagagttaaatgaaggatatggtggttaatatttaaagtaaaaagatatttttgaagaagatgtgtttttagggtttttaagaagttgttatatttatgtttagagttattttgtaagtttatttggaaagtgtattggtgttttttggtataagatttatgaatattaatagttttgttatgtgagtaggtgtttatattgaagggttataagtaaagtttttatgtgttattattgttagaattttttttgtttttttttaatataaaagtagttttgtttgttagtatggaagttttgggaagagttttatatttgttttgtgttgttaatatttttgttttggtttttttgttggaatatataagttatttagtattagttatttatttttttggtagaattgtggtaagaggggattaatagggaaaaaaaattaaaaaataaataaaaagttaaaataatatgaaagagttgggtatgtttttaaaataattagtgtttattttttttagttttgtgtttgtgtttgtttgtattttgtatgtttgtttttgtggtggggggggatatgtttgtgtttttgaaaatttttttatttagatattataaggtattagtttaattttgaatatagttggttgtagtatggtgtatagatatgattgttttttttttagaaaattttttagtttaaatatgtttgtagagtatgatttatggtgtttttttttggattgtttagtgggtaattgttgtatgaaaattagagaaatagatgtagattttgaattttggttataaatttttgttttatgattatgggttttaaatgtgttgtgttatattgataaatatatagttattttgaaataaaatggattttatttttaaagttttgttttttgttttttattttttgtttgtttgttggttggaaatatatttattagattattgattaaatataaagaaaatagagatgatatatattagaatgttattttatgttataataagaagatatttgggaaagttttttttaattttgtggttaatgtttaaaatgggtgttagtagtttatattttattatggataaattggtttattttttattttttattttatttattaatttttatagtgtatggatttgtatttaaagaattatggtttatttatgtattttttttttattttatttaaaatgaagaatttggagatagaattaagtttttaagaagtgtaagtatttattgatgaagaaataattagtatgtggttaaattatgggtttgttttataaattaatatttggattaagtaatagttttaattattgttattagtataattaatttatgatgaggaatgattaattgattagtgaatattgttatattataagaaatttatattattttttttatggggatttaaatattgattatttattttaaggtttaagtttattttttagttgagaattttaaggtaattatatattttatatttttttgtataaagaaagaaaatattgagttgtttaatttttattatatatagagagagatatattaatgttgttatttttgtgtaatgatatagtatagaggtaagaaatttggaagtagtggttttgtttaatgaggttgattttatagtttaagaaatgagaatgaatagaattttgaggatatttatttttatttttatttttttgggattagtgtatttttattttttggagagatgttaagtaagaatgtgtagtagttttttttggataatagatttttgtatatatatatttgttagtgatgttatgttttttatttttaatttaagttttttttgttttatttttaatatagttgttttttttttttttgtttaataattttttatttatttttattgtttggtaaaaatgaatttagtttttaaggaattttaaggattttaaataagtatttggagttataagttttatggattaagtagaaattggtatataatgtagtgttttgtgtatttttataattattttaatgatagtgtgttaaatgttttgtaaatttttttgtgtttttttgtttaaaatgtgtgttttttttgtagttaaagggttttttataataagtttttgttataaaatgatggttatataaaagagagaagagaggtgtaaaaataataaatatagatttagtaaaaattttatttttttattgttttgaattttttaatagtaagaattgagtttgttgggttgaaaattgttttaatgtatttttataaaaggatttttgatttggtaagtgtgtgtgatgtatattttttatgttatattataagtgttatttagtaattttattagatagggtagtgttttagtatggggtggggtgttttttgataggtttttaaaaggtttggatgttaatgtatattttaatattatttataaaaaggagattggagtagtgtttttttttgtattgggtaaggagattttttttttttgtttaattatttgtttgttttgttttgtgggagaattataagtaaatgttatagaggtagtggagaaaaaagggtgttttaatttttttttagagttttttttatttgatgtatgttgtattttttaaataagttgtgtaaaatggttgtagggtagattggtttttttttttaaagttttttatttggttgggtttatttgtaaatattgtatttattttttttagtgttttaggattggttggaaagatttttttttttgtaggttgggttagtgtgagagatttaaaaaattatttttttttaaaattattgtattttaataaaaggattgggtaggggttggaatgagagaaaattggttttttaaaatgtaaaattgttatatttaaattagtttataaaatatgtgtttaattatgtggtgggatgtgtgtaggtgtatgatgagagaggtaattaatatggttatttggggtgtaaggatgtgggaataggtaagtaatttttatattggatttttattttagggagttgggttttagttatagttttgagttgtgtgattttgggtaggttttatttttttggggttttgttttattagttgaatagtatgaggatgagttatagttaatatttgttttatgatatttatttagtattatataagtgttatttttgtttttttagttaatattgatgtgggtagtattatatgtttattttatagatgaggaaattgaagtttgaagaagttaaatatttattttagaatatatagttggtaagtggtagatttggaattggaatttagtttagtttgattttttaatttatgtttttgattattatattgtttttttaagtttagatttgaaattttattttttgtgtggttgtgtgtttgggataggggtaattaatttttgattattttatatgttgtatagaatttggagaggattttttaaagtaaatgaattttgaaagttggattgtagagtaaatgagtgtagttaatttagttaggggtttgtaagagggagaaagagaaaaagattgtggaatggaaagttttttaatttaagttttttttaaggggtagttattttttgttttatagtttagggtttgtatgtgttttttttggagtggaaaaatatataagttataaggaatttaatagatagaaaggtgtatagaggaatttaaagtgtgggttggggggtgaggtggtgggtgggaggtgagtgggtgtaggtggaatattgttttttaagttaagttgttgtaaataaaaaggtgtaaagggagagaagttggtgtttaatgtgagttaggagtagtgttttggttttttttttgtttattttaaaagtattttttgtattgtttttaaggtgagaaataggaaagaaaatgttggtttgtgtgtttgttgtttgtttttttggttgtttgtttttgtagggttgttgggagtttttaagttttgtgagaattttgggagttggtgatgttagattagttgggttatttgaaggttagtagtttgggtagggtttattgaaagtttatttgtatatattaggtaatttaattttttattttgtgtgatagaagtagtaggaagtgagttgtttagaggtaggagggtttattttttgttaaaggggggattagaatttttttatgtgagttgtttgaggattgggatgttgagaatgtgagtgatttgagtagggtttgtttgggtattgttggggtaggatttggaatgtatttggaaggttttttgtaagtatttatttggaaggagaatttgggatttttttgggaattttttgttttggttggattggttgagtaagtttggaaaatggtaaatgattatttggattaattataggtttttagttggtttgtttgttataatttatgatttggggttgggaaaaagattaatagtttatgtgttaaaaaaggggtagagtttgatggagttgggtggatttttttatgttatttgtttttatatttagaggataagtatttttgtagatatttagtgtaagggagattatgtttgattgtatggatgttttgttagtgagttttgggtaaattttggatttttatattgtgagtttgtttttttgtatgttttaggagaaagtttttaaagtatgttttagtggattgatttaaattgaatggtagtattggtatattgtttaatgtaggtttatttttttttttttttttattaagaaaaaaaaaattgttttttttgtatgtaataaagatgttggaaataaattgtattggtagtaagataaaggatttaatgatttaatgttgaaggggtgtgatatgttggtatgtatattgattttttttgttgaaaattttttgttagatgttttttttttaaataattttttttgtttttatgtttttttttttattaattttatagttttttgaaaatagtttttaaaatatgtataaaaatgtggggggtggggagtagagggtgattataagattttaaaatattttttaagtagggtaatttgatatattttgtagtttttattaaaatgtatgtagagtggaatttaattttgttgttttttggattagttattagttgtataggtttttttattttttgtgtattttaatagtttaaagtaattaaaatatgatattttttttgaaaggaatttagtttaattaaggtggttgttgtttttgaagtttataaattattagtttaagttgttgtttttaatgttttttttgttaaggaaaggtaatattttttagtattgattttgttgttatttttttaagttattttgttggtttaagaagttgttgttttgttagaaaattattggtaatgaatattttttggattgagttatttattatttttatattttgtagtttagtttggaatgtggatattagttaaaggaaaggaaatataagtggggtagtttaatttaaaaaaaaaatattgattattttgttatttgatgttgatatagtgttgaggtatgtatttggttaatagtagtttggttgtaggtttgagaaatgattaggagttttagaaaattttatttttgggtggttgtagtgggagtttgtaggatgttttgttgttttgatagtgatttagataaatggtttagttatttattaaaatgtttttagtattttatttg

SEQ ID NO: 338 - DNA, 6478 bp, Artificial Sequence
  chemically treated genomic DNA (Homo sapiens)
taaataaagtattaaaaatattttgatagatagttgagttatttatttaaattattgttagggtggtgaagtattttgtaggtttttattatagttatttgaaggtgggattttttgggatttttgattattttttaagtttgtagttaggttattgttgattaggtgtgtattttggtattgtgttagtattagataataaaatagttaatattttttttttaaattgggttattttatttatatttttttttttttaattgatgtttatgttttgggttgaattgtaagatatggaaataatggatggtttagtttaaggggtgtttattgttagtagttttttagtaaaatagtaattttttagattaataaagtgatttggaaaggtggtagtagggttaatgttaagaaatattgtttttttttagtaaggaaaatattggaagtggtagtttgaattggtggtttatgaattttgggagtagtagttattttaattaaattaaattttttttaaggaaaatgttatattttaattattttggattgttggaatatataaggggtggggggatttatataattagtagttaatttaaagaatagtaaagttaaattttattttgtatatattttagtaaaaattgtaaaatgtgttaaattgttttatttgaagaatgttttaaagttttgtggttattttttattttttattttttatatttttatgtatattttaaaaattgtttttaagagattataaggttggtaaggagaggagtatgggggtgggaggggttatttgggaagaaaatatttaataggaaatttttagtaaagggaattaatatgtatgttagtatattatatttttttagtattaaattattaaattttttgttttgttattaatgtagtttatttttaatgtttttattgtatgtaagagagataatttttttttttttggtagaagaagggaaaaaaataaatttatattgagtagtgtgttgatgttgttatttggtttgggttaatttattgaagtatgttttgagagtttttttttggagtatgtaggaagatggatttgtagtgtagaaatttaggatttgtttaggatttattgatagaatatttatatagttaaatatgattttttttgtattgaatgtttgtaaaagtgtttattttttaggtgtggaggtaaatggtatagaaaagtttatttaattttattaaattttgttttttttttggtatgtaggttgttggttttttttttagttttgaattatgaattatgatagataagttagttaaaagtttgtaattgatttaaatgattatttattattttttaggtttgtttggttaatttagttggggtggggggtttttagaaagattttaagttttttttttaagtaaatgtttgtaaaaagttttttgaatgtgttttggattttattttgatggtgtttagataaattttgtttggattgtttgtgtttttggtattttagtttttaaatagtttgtatgggggaattttggttttttttttggtaaagaatagatttttttgtttttgaatagtttattttttattatttttgttatatagaatgaaagattgaattgtttaatatatgtgagtgaatttttggtgaattttatttgggttgttaatttttaaatgatttaattagtttgatattattaatttttaggatttttatagagtttaaaaatttttagtagttttgtaaaagtagatagttagagaggtaggtagtgagtgtataagttggtgtttttttttttattttttattttaaaaataatataagaagtgtttttaaaatgagtaggggaggagttgggatgttgtttttggtttatgttgagtattaatttttttttttttatgtttttttatttgtggtggtttagtttggaaaatggtgttttgtttgtgtttgtttgttttttgtttattgttttgttttttagtttatattttaaatttttttgtgtgtttttttgtttgttaaattttttataatttatgtatttttttattttagaaaaagtatatgtaagttttaaattgtagaatagagaatggttattttttgggaaaggtttgggttgggaaattttttattttatagttttttttttttttttttttttgtaagtttttggttgaattgattgtatttgtttgttttgtaatttagtttttgagatttatttattttgaaaaattttttttaggttttatgtagtatatagagtagttaggaattggttatttttgttttaaatatatagttatatagaaaatgagattttagatttggatttgaaaaaatagtatagtggttaagagtatgggttggggaattaaattgaattagattttaattttaggtttgttatttattagttgtgtgttttgggataagtatttaatttttttaggttttagtttttttatttgtaaaatgggtatataatattatttatgttagtgttaattgggaggatagaaataatatttgtatggtgttgggtaaatattatggaataaatgttagttgtgatttatttttatattgtttaattggtgaaataaaattttggggagatgagatttatttaaggttatatagtttagagttgtgattagaatttagttttttaggatgaaagtttaatgtgaaaattatttgtttgtttttatatttttgtattttaaatagttatgttggttgttttttttattatatatttatatatattttattatataattaaatgtatattttgtaaattggtttaagtatgatagttttatattttgaaggattagtttttttttattttagtttttgtttaatttttttattaaaatatagtaattttaagggaaaatgattttttagattttttatattgatttaatttataggaagaagagtttttttagttagttttaaaatattaagaaggatagatgtagtatttataaataaatttagttggatggagagttttaaaagggagagttaatttattttgtagttattttgtataatttgtttaaaggatgtaatatatattaaataaaggaaattttggagaggaattaaaatatttttttttttttattgtttttgtagtatttatttgtaatttttttataaaatagggtaggtaagtggttaggtagggagggagagtttttttgtttaatgtagggaagagtattgttttagttttttttttgtggatagtgttggaatgtgtattggtatttgggttttttaaaagtttgttagggggtattttattttatgttgaaatattgttttgtttagtggagttgttaagtggtatttgtggtgtaatatgaaaagtatgtattgtatatatttattaagttaaagatttttttatgaaggtatattaaaataatttttagtttagtaagtttagtttttgttattgaaaagtttagggtaataaaggggtgagatttttgttgaatttgtgtttgttatttttgtgtttttttttttttttttatatggttattattttgtaatagagatttattgtaagaaattttttaattataaagaaaatatatattttaagtaagagaatatagaggaatttataaaatatttaatatattgttattaaggtagttgtaaagatatataaagtattatattatgtgttaatttttatttggtttatgaggtttatggttttaaatgtttatttaaggtttttagagttttttggaaattgagtttatttttattggatagtggaggtggatgaaaagttgttagataagagaagaggaaatagttatattggaagtagagtaggagaaatttaagttagagatgagaaatatggtattattgataggtatgtgtgtatagggatttgttatttaggggaggttgttgtatatttttgtttaatatttttttaaagagtagagatgtattggttttagggaagtgaagatggggatgggtgtttttaaaattttgtttatttttattttttaagttatggaattagttttattgagtgagattattgtttttgaattttttatttttatattgtattattgtataaaaataataatattagtgtgtttttttttgtgtgtggtaaaggttgggtgatttgatgttttttttttttgtgtaagaaaatgtaaaatatataattattttgaagtttttaattgagaaatgaatttgggttttgaaatgaataattagtatttaaatttttatgaaaggaatagtatgggttttttataatatgataatatttgttagttaattaattattttttattatgaattaattatgttgatagtaataattagagttattatttaatttaagtattaatttataaaatagatttatgatttagttatatgttaattatttttttattagtaaatgtttatattttttgaaaatttgattttgtttttaaattttttattttaagtaaaatgaaggaaagatatataaataagttataattttttaaatatagatttgtgtattataaagattaatgagtagggtagaaagtgaaaaatagattgatttgtttgtaatgaaatgtaaattattgatatttattttaaatattagttatagggttggaagaaatttttttaaatatttttttgttatggtataaaataatattttgatatgtgttatttttattttttttgtgtttgattaatgatttaataaatgtatttttaattaataagtaaataaaaagtgaaaaataaaaagtaaaattttgagagtaaaatttattttgttttagagtaattgtatatttgttagtgtgatatagtatatttgaaatttataattataaaataaaaatttatagttagggtttagggtttatatttgtttttttggtttttgtatagtaattatttattggataatttagaaagaaatattatgaattatgttttgtaaatatgtttgaattggagagttttttgaagaaagagtagttgtgtttgtgtattgtattgtagttggttgtgtttaaaattgggttaatattttgtgatgtttaaataagaagatttttagaggtgtagatatatttttttttattataggggtagatatgtaaagtgtaggtagatataggtatagggttgggggaggtggatattgattgttttaaagatatgtttagtttttttatgttgttttggttttttgtttgttttttaattttttttttttgttaatttttttttgttatagttttgttagaagaataaatggttagtattgagtgatttgtgtgttttagtagggaagttaaggtagagatgttggtagtatgaggtaagtatgaggttttttttagggtttttatattagtaggtagagttgtttttgtgttggaagggagtgggggaagttttaatagtaataatatatggaaattttgtttgtggttttttagtatgaatatttgtttatataataggattgttgatgtttgtggattttatattaaaagatattaatgtattttttaaatgaatttgtaaggtggttttgggtatgagtatagtgattttttagaaattttagaaatatattttttttaaaaatgtttttttattttgagtgttggttattgtgttttttatttggtttttttttttttagttttttgtttttttagatttttttttataaagtttttttatttggttatatataaatattgtttttttaagataagggtatatttttttttttttatatttttgaattattttttttagtgtttttgtgttttttgttgttgatgatttataaagatagttttttaagtttaatagttttggttggttttaatttgaaagttaaatataatttttgttgaatgttttagtattgagtagtgagttgtgaattattttttagttgattgttattgttggtggtattgttttaatattagttttggggagatttatttttggttattttattttgtttatatttttttttttaaatttagatttttattttttttttttttttttaaaattttatttttatattttttattattttttataaatttagatttaagtaatatatgtttataaaaatttaaagttttgtttaaaagatataaagtgaaaagtaaaagttttttatatgtatttattaaatgttgaatatttattatgtgttaggtattttaattggtgtttggtatagatttgtatatttttttgggattgtgtgggggggtgttgtttgttgttattatattagtatggttttatgatatatattgttttgtaatatttttaaatttagtaatattttttgaatatttttttaaaataaa

SEQ ID NO: 339 - DNA, 2534 bp, Artificial Sequence
  chemically treated genomic DNA (Homo sapiens)
aggtaggaaagtgggatagttggggagttggattttattttttgtgagttttgttggtatttgatggtatgtggtttggagagggtaggtgatttggtgtggagggttagagggtaaatttttaaataagtggtaataggttattaatttgaaagggaaaattgtgtagtgatgggaaatgtgtttaataaatttattgggtgattaattataaaggttgggttggagttttagaggttgtttgttaaatattttattaagtggtattttgaaagttgttatttgtgtattttgggagtttagaggggattttgagggggaatgaggtttggaggatggaattatttttaggtagattgagaaggagtttggattttatttttaaatatagtttggagtttataggttagaggttttaatgggagaaaagttaaaggaagagggtgtagaaaggagttttagggaattggtggttatgtgattttgagtaaattttatttttttttgagatttagtgtttttatttttatggttttgtgtgtgttatagagatatggtggggattaaatttgattgtgatatgaaagtgtttgggaaattttatggttttatttaaatatgagttatttttatttgaattaaggggggaagttatttggtaggattaggaattttatttttttgaatttttatgggttttgttgaggttgaagtagttaggggttaaagttagtttttagtttttggaagggtattgtgaaagtggatttgatttgagaagttgttttttgatgtgggtagttatgtgatgttagttttgaataagagggggtagtttggagtttggaaaggtgttagtgtaggtggggtttatgtttagattttttttgttgattgttttgatgatttatttttatattttagtttttttatttttattgtagagttggaaagggtgtggggaagagaggagagggaggtaggttttgggttttggttttgttttttgtttttttttatttttttttgggtttggttatttagttaaaaggtaggttaagagtaggagagatatagagtttggtattggttttaggtagtagttagtttgttgtttgtttgtgtgtttttagagttatggagagagttagtttgatttagaaggttaagttggtagagtaggttgaatgttatgaggatatggtagtttttatgaaaggtgttgtggagaagggtgaggagtttttttgtgaagagtgaaatttgtttttagtagtttataagaatgtggtgggtggttagagggttgtttggagggtgttgtttagtattgagtagaaaagtaatgaggagggtttggaggagaaggggtttgaggtgtgtgagtattgggagaaggtggagattgagttttagggtgtgtgtgatattgtgttgggtttgttggatagttattttattaaggaggttggggatgttgagagttgggttttttatttgaagatgaagggtgattattattgttatttggttgaggtggttattggtgatgataagaagtgtattattgatttagtttggttagtttattaggaggttatggatattagtaagaaggagatgttgtttattaattttatttgtttgggtttggttttgaatttttttgttttttattatgagattgttaatagttttgaggaggttatttttttggttaagattatttttgatgaggttatggttgatttgtatatttttagtgaggatttttataaagatagtatttttattatgtagttgttgtgagataatttgatattgtggatggttgataatgttggggaagaggggggtgaggttttttaggagttttagagttgagtgttgtttgttattgttttgttttgttttttttagttttttattttgttgagaggattagtatggggtgggaggttttattttttttttttaggtgttgtttttgttttaaagggttttgtggagagggattggtagagttgaggttatttggggttggggattttattttttttgtagttgttgagtgtatttaattattggttatgtttttatttttgttttttgtatttgtttttttttgattttaggattaggttattttttttttttttttgttttttttttgtttttgttgtttttgattgtaggaattgaggagtgttttgttttgtggttgagaattggatagtggtaggggttggagatgggtgtgtgtgtgtgtgtgtgtgtgtgtgtgtgtgtgtgtgttagtgtaagattgagattgagggaaagtatgtttgttgggtgtgattatgtttttttttaataaagtttttttgtgatattttttttgttttttttttagtttttggtgatgggttgggagtgggattggaatttgatttagagattttgattttggatttttgagttagggttttgaattttttaggtggtttagtggtttgtatgtaagattttgagtttaggtgaggttggggttt

SEQ ID NO: 340 - DNA, 2534 bp, Artificial Sequence
  chemically treated genomic DNA (Homo sapiens)
ggattttggttttatttggatttaaagttttgtgtgtgggttattgagttatttagggagtttagggttttaatttagaggtttaaagttagggtttttaagttagattttagttttatttttagtttattgttaagaattggaagagagataggaggagtgttataggggaattttattgagaggaaatatggttatatttagtagatatgtttttttttagttttggttttgtattggtgtgtgtgtatatatatatatatatatatatatatatatttatttttagtttttgttattgtttagtttttagttataaggtgggatattttttaatttttatgattagaggtagtaggggtaggagggaggtaagaggaggggagaagtagtttggttttggggttgggaggaagtgggtgtggagagtaggggtgggggtatgattagtggttaggtgtgtttaatagttgtaagaagagtgggatttttagttttaggtggttttagttttgttagtttttttttatggagttttttggagtaagaatagtgtttaggggagaagggtggggttttttattttatattagtttttttggtagggtgggggattggagggggtagggtggggtggtggtgggtaatatttagttttggggtttttggggagttttgttttttttttttttggtgttgttggttgtttatagtgttaggttgttttgtagtagttgtatgatgagggtgttgtttttgtaggagtttttgttgagggtgtgtagattagttatggttttgttgaaagtggttttggttagagagatggtttttttggggttgttggtgattttgtagtggaagatggaaaagtttagggttaggtttaggtggatggggttggtgggtggtattttttttttgttgatgtttatggttttttggtaggttgattgggttgagttaatgatgtgttttttgttgttattggtggttattttggttaggtagtggtagtagttattttttatttttaggtagaagatttggtttttggtgtttttggtttttttgatgaggtggttgtttagtaggtttagtatggtgttgtatatgttttggagtttagtttttatttttttttggtatttatgtattttgggtttttttttttttgagttttttttgttgtttttttgtttaatattggatagtattttttaggtagttttttggttgtttattatgtttttataggttattgagagtaggttttgttttttgtaggagagttttttgtttttttttatggtgttttttatgaaggttgttatgtttttatagtgtttggtttgttttgttagtttggttttttggattagattggttttttttatggttttggggatatataggtgggtggtgggttaattgttgtttgggattaatgttggattttgtgttttttttgtttttggtttgttttttggttgggtggttaggtttagagaagggtggggaggagtagggggtgggattagggtttaagatttgtttttttttttttttttttttatattttttttggttttgtagtaaaggtaaaaaggttgggatgtgggggtgaattattagaatagttagtaggagaaatttgggtgtgggttttatttgtattggtatttttttaggttttaggttgtttttttttgtttggggttggtattatatggttgtttatattaggaaatggttttttaaattagatttatttttatagtgtttttttaggggttaaggattggttttagtttttggttgttttagttttgatagagtttataaaggtttaggaggatggggtttttaattttgttaggtaatttttttttttggtttaggtgaggataatttatgtttaggtagggttatggagttttttaagtatttttatattatgattgaatttaatttttattatgtttttgtgatatatataggattatagagatgggaatattaagttttagagaggggtgagatttgtttaaagttatatagttattaattttttgaaatttttttttgtattttttttttttagttttttttttattgaggtttttgatttatgagttttagattgtgtttggaagtgagatttaggtttttttttagtttatttgaagatggttttattttttaggttttatttttttttagggttttttttgagtttttagaatgtgtaggtggtagtttttagagtgttgtttaatgaagtgtttaataagtagtttttgaagttttagtttagtttttgtaattagttatttagtaggtttgttggatatattttttattattatataatttttttttttaagttggtggtttgttgttatttgtttgaggatttattttttggttttttatgttaggttatttgttttttttaagttatatgttattaggtattagtggggtttatagagggtggggtttagttttttggttgttttatttttttgttt

SEQ ID NO: 341 - DNA, 6558 bp, Artificial Sequence
  chemically treated genomic DNA (Homo sapiens)
taagattataaattgttttttattagtggggaaggttttaaatattatgtatttagtataagtaggtgtaattaattgtaatggtttgttttgttatttttgattaatatataattattaggttagaattgtattttataagttttttgtgtttagttattttgtatatattaatttttttaagttttgtgttttaaaagaattgtatagtgttgggaagttttttatttattttaatttttagggtattgagtttgaatttgaattaggtattaggtatgttttattattataaaagatgtaaaaagatgtgtatagtggtgtatatttatagttttagttattgaggaggttaatgtgggaggattatatgaggttgtagtgagttgtgatggtgttattgtattttagttttggtgatagtgagtttatgttttaaataagtaagtaaataaaaattaaaaagaatttagtttatagggtatttgaaggtaagaggaaaagatgttagaattagagatggggagaagatgggtttttggtgtttgttgaggttgagaaatgagatagataggttgagtgtggggtggagagaggatgggtagagagattgaggttggtttgaatggaaatgaaatgttagggtttttagggttattggggaataattggagtttttaggaaaggtttaatgttgtgattatttgtgtttgttatgtttttttattttttattaattgtgtgaatttggtagattttgagttttagtgtttttttttgtgaagtggggttattttattttaatttttgggattgttgtgtgaattaaatggggtaatgtatggagagtatttgatgtatagtgagtgttttaaaattttagtttgtattttttagtaaaggatatgtatatgtttattgtgagtgataaatttaggatgatttgaatttaatgtgataatgtgggtttttgtatgttggttatgttgttgggagatatttatggatttaattagtataataggggaaataaattatttaatgtattttgttaagatagaatattttagaatttattttgtggggtggggtataataaagggggtttttttgttgaaaatgtttaagtttaggtttgtggtattatttaattaaggttgatagttatatagtaagttagaggtaatgttaggatttaaattaaatttgtggtttttataatgaggttattttttttttttttgaatggtttggggaaagggggtgggtgggtagaatttggtagtggttaattttttatttttgttttttggtttttttttgtttttatttttaggtttgtattgattgattgattgagatagggttttgttttgttgtttaggttggagtgtagtggtatgattatggtttattgtagttttaaatttttaggtttaagtggtttttttgttttttattttttgagtatttatatttttaggtttttaaaatggtttttaggtatttggttgttgttttagatatttatttgggtttttgggtagggattgtttgggaaattttatttatgtgaagtaggtgtgggtgtaggaaggttgtttggaaatgaattagtattgttttttgtttgagttgtaagtagggtgttagagggtttggtggataagaaagggaggatgataggaggttggtattgtaatgatatgttttagttattagagggtatgaagtagttgggtaaaattttgtggggttgttggtggaaaatttttggtatttggagtttggagatggggtggatggaatgtgaggatttagttttttgaggttgggttggggtagagttattgttttggatgtttgtagggtttgtttgtgttttgattattttgtttttgtagatagttggagaatgtgagagtgggattgggattggattttaggggttattttgtataatttttttgttttgttgtgggggagggagttgtttaaggttatgtagtaagttagtggtaaatgaatatgattattattagttttaggtatatggttatttgatgggtgtagttgtagttttagtttttgagatagagatatttgattaaggataggtttttaggagttgattttagtgatttgtggttttgttgttgtttttgtttttttttttggtttttttatttgattgattttttgttttttttgtttgtttgtttgtttttgtttttgtttgttggggggtttgtttaatttttttattgggttttgggagttgtagttttttgttgttattttttagggatttgtagttttttgaagtttttttttgatttgttgttttggttttatttttgggatttagaggagaggtgattattttgtagtatagttagtggtgtgattttatggggtgagaaggatttttttgtttttaagtatttttttagtgatttttgttgttatgtggtagttgtaagtattggttggtatttggtgtgggtgagatttttattttatgtagaaatgagtaagattggtgagtttattatgtgggggtgaggttgagagaaaataagtatataggtgatttagttaaaattagaattttttaagtatatatgaaaagggtaaaaggggtgttttgtataggatagaataggtagatattgaatttggttgggttttgggaaggttttttgtagtggtttttgaagggggggttggattttagtaggatagagggtatgggtatgtgtgggtatgttttgaatagaggggttagtgtaagttgagggttttggttatattagttgtatgtgttggtgtgtttaagggatatgtagtagtaggttgagtttggagtgttttattgttaggttttttaaaaatttttaattttaatttaattttattttatttttattttaagttttggtatatatgtgtagaatgtggtttgttatataggtatatatgtgttatggtggtttgttgtatttattaatttattatttaggttttaagttttgtatgtattaggtattagttttaatgttttttttttttttgtttttatttttttttttgtaattgtttataggttttggtatgtggtgtttttttttttgtgtttatatgtttttattgtttaatttttatttatgagtgagaatatattgtttggttttaagggatagttatggggatgtattgtagtttttgagtagggaaggttttgtggaggtttttagttaaaaggaaagaatggttgtgaaaattgatgtattgtgtttttttgttttttatttttagtgtgaagggtttttattttgagttttatttgaagtaggttttgatgggaagataagtagtatgaggggtttaagtattgaggggagtaagggatatttggtggttgtgttaaggtgtagaagaggatattgggggttttaaggtttgattttatgtatattgtttaggttggtttttaagttatatggtgattgttaggaagggattagtttgtttttagtttgatttttttgttatgttattatttaaagttttttttggtagggtttgtttggggtttttgtgttagtgttttttttgttaggttgggttggggtttttatttattgttttgggattgttgttgttttggttttgggggaggagggtgtgttgttgagttattgtttgggtatttgggtttggaattttgggtgagttatttagggttgaggtagaggggttgggggaggggaagaagttatttgatagttggagtagggaggggagttggggttataggaagggtggtgttttgatgtttagatgggttgggatagataaagggttaaggaggaaggggttttgggagggggtagtttttttttgggttgggttttgaatggttatagtgtttgtttttttttgggtttggggaggatatgtgtgtggggggtagtgagagagggttgtggttgagggttgtgttttaggtttggattttggtttgggaagttgtttagttggtgtttttagttttgggtagggatgtatttttatttatttatttagtttttaagttggagaagaggaggttaaagtttttttgtttagtttttaattatttgggatttttttatgttttttatagattgtggtttagtttaattgtggttgtgtgtagagtaattttattttttattgtttttttatttttttagatatttttttatatagagggatttttttaggtatttttaagtatatttagttattttattattttattaagaggtattttggtgttggttattaaaagttattttattttatttatgttttgaagttagttttgtttttttttttttgatgttttttagttgttttttttggtttttagttttttaagggtggttttaggttgttttttttttatatatataggtgtatgtatgtatatgagtattggattatgaagttttagtgtgtgtttatagttttttatataggagtgggttgtgatttataggtatgttatgagaatgaggtttggtattagtttttaggttttagagtaggggttgtttttttttattttggtttaggatgtttagtttttatgatattttttattttttattgtggtttgggtgggtttaggggttgtttttgatttggtttagagtttttttttagttggtggtggagttggtattttttgggagggagggggttgggagggaatgagtgggaatggtaagaggttagggtttggtgggattaggttgaggtaggtttggtttttttaaaatgttaagttgggggttagtggggtttatatataaatttttattttgggagtttggttgttttgtttttttttttgggtttgtttttgttatttggtttggtgagtatttttgttttgttgagggtagggtggggaggatttttgtgggtttttgtttttgtttttatagtttttttattttagtttttttggtgggattaatttgggtttttttgggtttttttttttggaagaattttttgtgaagtgttgaagtgttgattgaagggttttttttttttttttttttttttgagatggagttttgttttgttgtttaggttggagtatagtggtgtgattttagtttattgtaaatttttttttttaggtttatgttatttttttgttttagttttttgagtagttgggattgtaggtgtttattattatgtttggttaatttttttgtatttttagtagagatggggttttattatgttagttaggatggttttgattttttgattttgtgatttatttattttggttttttaaagtgttgggattataggagtaagttattgtgtttggttgattgaagggtttttttttaggtttttttgtgaggttttagtgtaggggttgttttgaggtttttttttggatattttagtttaggggtttttttttgggggtttaggtttaggagtaggaggtgtgtatgtgggtgttgttgtaaaaagaattttgagatttttttttttttttttttttttttttgtaaagttttggattttagtaggattaaggtgtaagaggtaggggttttaagattttgtttgggttatggttttaagtagtaaagttttgttttttgttttggtgaaggtagggttggtatgatgggtttagggtatgttttgtttttggtatagtttttttggttttattttgaaatttgtttaatttttttaggttggtttgagtatttttagaggttttgttgttgaggtttgttttattttgattttaaggtaatgaatattttatatttttaattttaattttaataggattttttttggtggagagaatgttaagttgtttttattttatttatgtttttgtttgtttagaggtttaggggtttttagggtgaggggagatatattttttattttttgggagtttttagtttgagagaggaaatatttttgtttaagggagtttttagttagatggtagagagagatgtttttggttttaggagttttgagtttaaggagggaaatgatttttttagggagttttttgtttttaggttgtagttatggtttttgttagattgtataggagtttttatttgttagttggtgtatgtggttttgttttttagagtttgtgtagatgttattaaaatgggattttggttattttgttattttttttttggtagatattaaaatggggagttttgtttttaggggggtgttttaagtgttattagaggaggtttggtgatttttagatataagggaagttttagtgtttgtttttagggtgagatggaggtattgtttttggttttagggaattatagtttgagggggagatgtagtttttgtttttttatttagagaggggttttgtgaggtggtttgggggtatagggtagaagtggattttataggttgagttaaggttttaagagttttagtagtgtatttattatttggtatttttgtagt

SEQ ID NO: 342 - DNA, 6558 bp, Artificial Sequence
  chemically treated genomic DNA (Homo sapiens)
gttgtagaggtgttaggtgatgggtatattgttgaggtttttggggttttagtttagtttgtaggatttatttttgttttatgtttttaagttattttataaaatttttttttgaatgggaaggtaggggttgtattttttttttagattgtggttttttgaggttggaggtgatatttttattttattttgagggtagatgttaaagttttttttgtgtttgggagttattaagttttttttgatggtatttgggatatttttttgagggtagggttttttattttagtgtttgttagaagggaaatgatagggtgattagagttttattttgatggtatttgtgtaggttttggggagtagggttatatgtattggttggtagatgggggtttttgtgtagtttggtaggagttatggttatagtttaggagtaggaagttttttgaaggagttgtttttttttttagatttgggatttttgaagttagaggtatttttttttgttatttaattggaagtttttttgggtaggagtgtttttttttttagattaggagtttttagagggtggggaatgtgtttttttttattttgaaggtttttgagtttttaggtagataggggtatggatagggtgggggtaatttaatattttttttattaggaaggattttgttggaattagaattaaagatatgaaatgtttattgttttgggattaggatgggatagattttagtggtaaggtttttgagaatatttagattagtttggaaaggttaggtaggttttagggtgaggttagaggagttatgttagaggtagggtatgttttgggtttattatgttagttttgtttttattgaggtagggggtagagttttgttgtttggggttatgatttaggtagagttttgagatttttgttttttgtattttagttttgttagaatttaggattttgtaaaaaaaaaaaaaaaaaaaaaaaaaaattttaggattttttttgtagtaatgtttatatgtatattttttgtttttaggtttagatttttaaagaagggtttttagattgagatatttaggggagggttttagagtaatttttgtattgagattttatagaggaatttggagaaaaattttttagttggttgggtgtggtggtttatttttgtaattttagtattttgggaggttgagatgggtggattatgagattaggagattgagattattttggttaatatggtgaaattttatttttattaaaaatataaaaaaattagttgggtatggtggtgggtgtttgtagttttagttatttgggaggttgaggtaggagaatggtgtgaatttgggagggggagtttgtagtgagttgagattatattattgtattttagtttgggtgatagagtgagattttattttaaaaaaaaaaaaaaaaaaaaaaaattttttagttaatattttagtattttatagagagtttttttaagggggaaggtttagagaggtttaggttgattttattagggaagttggaatgagagaattgtggagataaagatagagatttatggggattttttttattttgtttttagtaggatagaggtatttattagattaggtggtagagatagatttaggaaggagagtaaggtagttaggtttttagggtgaggatttatatgtgggttttattggtttttaatttggtattttaaggaaattaaatttgttttaatttgattttattaaattttggttttttgttatttttatttatttttttttagtttttttttttttagagagtgttagttttattattagttgggggagggttttaggttaggttaagggtagtttttgagtttatttaggttatagtgggaagtgggaggtgttgtggggattgggtattttggattggggtgaggggaggtaatttttgttttggggtttggagattggtgttaggttttatttttatgatatgtttgtgagttatagtttatttttgtgtgagaggttgtgagtatatgttgagattttatggtttagtgtttgtgtatatatatgtgtttgtgtgtgtgagagagaagtaatttggggttatttttaggaagttgggggttagaggaggtagttgggggatattaggaggagaaggataggattgattttagggtatggatgaagtggagtgatttttaatggttagtattagaatattttttaatgaggtaatgaggtaattaagtgtgtttagaaatatttgggaaggtttttttgtgtaggaaggtgtttggaaggatggggaagtagtgagaaatggggttgttttatatatagttgtagttgggttgggttatagtttgtggggagtataaggaagttttgagtagttaaaggttgaataggaaaattttggtttttttttttttagtttgagggttgggtgggtgggtaggggtatatttttatttaaggttgaaaatattagttggatagttttttaagttagaatttaggtttgaagtatagtttttagttatagtttttttttattgttttttatatatatgttttttttagatttggagaaaggtaaatattgtggttatttagagtttagtttaagggagggttgtttttttttagggtttttttttttttggttttttgtttattttggtttgtttgggtattagggtattgttttttttgtggttttagtttttttttttgttttagttgttgagtagttttttttttttttttagtttttttattttagttttaagtgatttatttgaggttttaggtttagatgtttaggtagtgatttagtggtatattttttttttttagggttagggtagtagtagttttagagtagtaggtggaagttttagtttagtttggtagggaaagtattggtatagagattttaaataggttttgttaggaggagttttggataatgatatggtaggaggattagattgagaataggttggtttttttttagtggttattgtgtgatttgggggttagtttgagtagtgtatatgaagttaggttttggggtttttagtgtttttttttatattttggtatagttattgagtgttttttgttttttttagtatttgaattttttatgttatttgtttttttattgaggtttattttaagtagaatttggaataaaaattttttatattgagggtgagggataagggagtgtaatgtattgatttttatagttattttttttttttaattaagggtttttatagggttttttttgtttagaaattgtagtgtatttttatggttgttttttaaagttaggtggtatgtttttatttataagtgggagttgaataatgagaatatatggatatagggaagggaatattatatattagggtttgtgggtagttgtggggagaaggatgggggtaaggggagggagagtattaggattaatatttgatgtatgtggggtttaaaatttagatgatgggttgataggtgtagtaaattattatggtatatgtatatttatgtaataaattatattttgtatatgtatgttagaatttaaagtaaaaataaaataaaattaaattaaaattaaaaatttttaaaaagtttggtagtgaggtgttttagatttggtttgttgttgtgtgttttttaaatatattggtatatgtaattagtgtggttaagatttttggtttgtgttgatttttttgtttagaatgtgtttatatatgtttatgttttttattttgttgaaatttaattttttttttaaaggttattgtagggagtttttttagggtttaattggatttagtgtttatttgttttgttttgtataaagtgttttttttgttttttttgtgtgtatttagagaattttgattttgattgaattatttgtgtatttgtttttttttagttttatttttatatggtgagtttattggttttatttatttttgtatgaggtaagggttttgtttatattaggtgttaattagtgtttatggttattatatggtaataggggttattggaggagtgtttaggagtaagggagttttttttattttgtgaaattatattattgattatgttatgaaataattattttttttttggattttaagagtggaattgagataatgggttggaaaagagttttagagagttataaatttttgaggagtgatagtaggaaattgtggtttttaggatttagtgagggagttgagtaaattttttagtgggtagagatggagataggtaggtagatgaagaagataaagagttagttagatggaaaagttagggagaaaaatagagatagtagtagagttgtgggttattagggttagtttttgaaggtttgtttttaattaggtgtttttgttttaggaattgaggttgtgattgtgtttattaaatggttatatatttgagattggtgataattgtatttatttgttattaatttgttgtgtaattttgggtaatttttttttttatggtagggtaggagagttgtatggaatggtttttagagtttgattttaattttatttttatattttttagttgtttataaaggtagagtagttaagatataagtaggttttgtggatatttaaagtagtgattttgttttggtttagttttaggaagttgggtttttatattttgtttattttatttttgggttttaggtgttagaaattttttattagtggttttgtgggattttgtttagttgttttgtgttttttggtggttaaggtgtgttattgtagtgttggttttttgttatttttttttttttgtttgttagattttttggtgttttgtttatgatttaaataggagatagtgttgatttatttttaagtggtttttttatatttatatttgttttatatagatgaggttttttggatagtttttgtttagaagtttaggtggatgtttgagatggtagttagatatttggaagttattttaaaagtttagggatatgggtatttgggagataggaggtggaaagattatttgagtttaggagtttgaggttgtagtgagttatgattgtgttattgtattttagtttggatgatagagtaagattttgttttaattaattaattaatgtaagtttagagataagggtaggagaaaattaggggatagaagtgagggattggttattgttaagttttgtttatttattttttttttttaggttgtttaggggaaagagaaatggttttattgtgggggttataggtttagtttaagttttgatattgtttttggtttattgtgtgattgttgattttggttgagtggtgttatgaatttgagtttaaatgtttttagtagaaggattttttttattatgttttgttttataaaataagttttgaggtattttgttttagtaaaatgtattaaataatttattttttttgttgtattaattggatttataagtgttttttggtagtatgattagtatgtgaggatttatgttattatattgggtttaggttattttggatttgttatttataatgggtgtgtgtatattttttgttggggggtgtagattgaaattttgaagtatttgttgtgtgttaggtgttttttgtatattattttatttaatttatataataattttaggagttggaataagatgattttattttatagaggagaatattgagatttaaagtttgttaaatttatataattagtaaggggtggggaggtatgatgaatataggtggttataatgttaaattttttttagaagttttaattattttttgataattttgagagttttaatattttatttttatttagattagttttagtttttttgtttattttttttttattttatatttagtttatttgttttattttttaattttagtaggtgttagaagtttattttttttttatttttgattttggtattttttttttttgtttttaaatgttttgtggattggattttttttaatttttgtttatttatttatttgagatatagatttattgttgttaaggttggagtatagtggtattattatagtttattgtagttttatgtgatttttttatattaatttttttagtaattggggttataggtgtgtgttattgtgtgtatttttttgtattttttgtggtgatggagtatgtttgatatttgatttgaatttgagtttggtattttaaggattggaatgggtaaagaattttttagtattgtatagtttttttaaagtataaagtttgggagaattaatatatgtaggataattgaatgtaagagatttgtggaatgtagttttaatttgataattgtgtgttaattgggagtaataggataggttgttatggttggttatatttatttatgttagatgtataatgtttggagttttttttattgatgagaagtaatttatgattttg

SEQ ID NO: 343 - DNA, 6432 bp, Artificial Sequence
  chemically treated genomic DNA (Homo sapiens)
tattatgtttagttaatttttgtatttttagtagagatagggttttataatgttggttaggttggttttgaaattttgattttatgatttgtttgttttggttttttaaagtgttggaattataggtataagttagtatgtttggtttatattttttaattgtatgtataatttaatttgtagatgattttaaaagtttaaattggagttttattgttttttttatttttagtttttataataaattttatgatagtttttgtttataagaatttttttgtagttttattatttgtaaattatttaattttgtttttttgtgattttttattttttatattttttatattttttagttattgttttaaaaattttggataataaattaatttaaatttttttttaaatggtatttatttatttttatttagatttatatggattggttagaggtaggtttgagattggttgatggaggtttggtttagatttaattaggaggttggtttatatttgttttatatgtttttttttttttttgtatttgttggtttttaagtgtttttaattgaaaataattagtatattaaagtagtatattttggagtggtattttttgaaattttttattggttaggtggtgaagattaattatttgattaatttgttttagagtgtagaataagtttggaattagataggattaagtttaaatttgggttttgttttttattagttatgtgatttttgttaaatatttaatttttttaatttttaaattttttatttgtaaagggaagattagaatagtattgtaaggatatgttttaaaatttaataaggattatttttggataatagggttaagaatttttttaaagtttgtttttaaaaaaaaaatttaaattttttatttataattaatatgtattatttttgtaatttttaaaaagttattttttttaaaatatattattgatgttttttgtaaatatgtggtataattgtaggttttattaatatttgtgaagaattgtaaataagagaatggattaggaaaattgatatttttatttttttttttattgaagataagaaatatatattgaatattgattatttgtagagtatggagtgtggttttatattgaaaaaggaatattttgtgtttttaagggttttataattattagggtagaattttaaaaagtaaataaataataataatgtattttatgttagaatggggtaaatatttttttttaaaaaaaggttaaataaatgaaatgttttttgggttatttttgggaaaggagtgattatagtaggtgaagtattataaaatattttttggaggaggtagtattatggatgatttataaagggtggatgatttttataaattaattatagttttagtgtttattggtttgttttataataaaaggaaaattggttaagagataagagttgagaatgaggttggttaatttataaggagaggaatttttttgttaattgttttagttgatagtaattttaatagttgtatgttataaagtttaggggagtaggaagttttttttttattataattgagaaatttaatgtttaaataaattataatttgatttagtttaattgtgtgtgtttgtgtgtgtgtgtagagtttaaaaagttggtaaaatagattgttagtttttaaaatttttgtttaagttgatatttattgttttttaatttattaagggtttaaatgttattttttttgttttttaaattttgagttgggttattatttttttgtttttatttgtaaatggtttagttttttatatgtatatattaattgtttatgtgaatatataaaatattatattaagttaaatatataattatgtgtgaaaatgatgttttgattaagggtattagatattttttttaataagaattttaaaaggaagggtattatgataattttttttttttttttttttatttattttttgtttttgagatagggttttattttgttttttaggttgaagtgtagtggtataattatggtttattgtagtgtttgttttttgggtttaagtgatttttttattttagttttttgagtagttggtattatagatatatgttaatatgtttggtttttttttttttttttttttttttagtaaagatgaaattttattatgttgtttaggttggttttgaatttttgggtttaagtaatttttttatttagattttttaaagtgttgggattataggtgtggattattgtatttagtttgatgaatttttaaaattattaaattgtaatatgtatgagtttatatatttattatttttattatgatgatttttaaaaggttagtttgtatttggtaatgttgaattttgattttttttaattttataggagattggagattaaattagaaatgttaagggtaaataaaattaaaattaatattaatgatgtattatggtaaagattattagttaaatattttattatagatttaaatatttagtttttaataatgtaaaatatttttgtgataattaaggaaaataaagtttttggaatttattggatatttatttgttatattgtgtttttaggagaaagaaagtatatgtttgttatttggaggaatttgggtaaatgtaggaaaaaaaaaagaagaagaaagaaatttatatatttttttatttttaagaaaaggaagtagtggtgatattatttttggttaaaatgtagtttgtttatattttaaatatttggtaataatgttttttttagagttatgaagtaattagaataattaaatataatttttttttaaatttttattgtttgatttatttatttatttaataaatatttattaaatattgattatgtgtttgatgtttagggatataatagtaagtggagggaaagatatataatatttgtttttaagaaatttggagttgagtggaggatagaaatataaattaaagaatgatataaataattataaagttatagttgttaaaagaaaagtatatggtgttaagagaatgtgtaatataagatttatttatggaggtgagggaaagtttgtttattaaagaagttatgatttaatttatgaagattaggagttggttgggtgaagaaaaaaaggttagaggaaggaagtttatattggggaaggttttaagtataaagggtaggaggattatagaggtatatttatgaaatttggagaaggtttttagtaagtaaggagaagttaaatgaaagtttatgggagagttggaggtttgaagatatgtttaaggatttggtttttattttttttttattttaagagtagtgggaagttattaaatgattttaattagagggttggtataattagttttgtattttgaaaagttgaatttagtttttgtttgagaaattgagtgaaagagtttagaatggttgtggttgagggtgatttgtgggagatttttatataagttatggtagtggtatgggttggtggtagaagagggaatagggagaagatttggaatttaatttttttttattgataaagttattttagttttggtaaggtaattaattggtgggaaagaagatgtttagtttttttgattttattgtattttttgtatttttaatatgagtattgggaagtggtaaaatatttagaggtagtttgggtgttaggtggagtatgagttaaaattttaggatgaagtaaatgaatatttagaatgataggaaagatttgggagttgggtttgggggagggttatttatttttattttttggagattttggtataaatttttgtttttgtaattttttttttaggtaaaggaatttattaaatgaattgttagaagatttattgattagagggttgtatagaattatatttttgagagtgggaagtaggttgattatatagtttattatttaattaggatatatttgaaagagaaagggggttttattaatatttaaattataaaatatgtatattaggaatgttttgggtaaatttggttgttttagtaagaaaggaaatttgaaagtttatattgttttgtttttatgttattttgtttgtatatgagagggtaagtattttttttttttatttgtattaagggaataaaagtataagtatttaggtgatttttaatttatttttaattttatagtttttgttatattttatatattttgaaaattatattttttattattattattttgtgataggtgattatttataattatttattgatttagttttgggaagaggtggtgtaaaatgggatgttttatttaggtgtttattagaaatgtagaatttttgtttgttttttagatttattgaattagaatttgtatttttaaataagatttttaggtgattaatatgtatattaaaatttgagaaaaatttttagattttgatttaaagaaaaatattttataatttgatagtgtatgtatatatatatatgtatatagatataattgaagtataaatttaatgaagtagaatttattgttattattttatttgggaaagaaatgtgtttgtgatttaatagattggagtatttatttttggattttaatttgtaatttgaaaatgtatttttaaagtatttaggagtaatttgaagaaagttgaggggaggtggtagatgttttgatttattagggaaaatgtggatgttttttgttgttattttgtgaattgtgtgtatttagttatttttgagtaaatatttggagtgaggaatttttgagtggtgtgggagggtggtgaggggtagttgaaagttggttaaagtttttggaggggttggtttaggaaatatgattggtagttatgagagagttaggggttggatgttgaggagagggagaaggtttttgggtggagagaggttttgtttagttgttggtgaggagttttttgttttttttgtagtgttgagttgaagttgagtgagttatttgtgtgtatggagtgatgatatttttgtgtgtgtatttgtttgggataggagttggatttttgtgtagttttttttggttgttgggggtttttttgtgttttgttggtttttaggtttttttttggttggtgagtgggtgttatatttggtttgtatatttgtgttgttggtttggtgtggggtttggagagggtgtggtgtggaggtgtagttaggggtttgggaaggtgttgtttgttgtgttgggggtttggtttatgatgagtagtggggtttgttatgggttgggggttgtttaggggtttgtggttgttgtatattgttttgtggatgtgtattgttagtatgattttattgtatgtttagaagttgggtgagtggtttttagtttgggtttggtggggtgttgggggtttttttggggtttttgtttttttgttgtgtttgatagttgggtttggtaatttggtttttgggtggaaatgaggaaagttttttttgtgatatttatgtagtttgatttttgtagttgtagggattgtgagttttttttgaaaaagagaaggaaagtttagttgtaaggggtgtggggtatgtttggttttttttgtgtgagtaggaaaggtgttgtgttggttgtgtttgaggtgagtttttatttttggaaagggaagtttgagaagttggttatttgaaggtggttggggagtagtggtttggagtggtagtttgagttgttaaagtagttagtgtatttgggttattttgtttatggtgatgttgtgtgtttatttagttttttttgagttatttgtttaaaaggttagttttttagtttttagtttttggagatggttatgtttttttttaggttggttttttggtttggagtttttggaaataagttttaagaaaataattgatttttaaaagaaagttagttggttttattgatgttttggtatggatggatagggagtggagatgtttaggtgaaattgagaattttttattgaatgtttattgggtgttagaggttgtagattttgtttggaataagatagttttgtttttagggagttgatggttttatgtaattattgtttgttggaaattgaagggttaaaattttaattaggttatttatttgattgttgtttttgaaggtttttaaggaaaaaataaaaataaaaaaatatatatatatattatatatatataaatatatatataattatatatataaatatatataatattaatatatatatgtatgtaggaatgggggtttttaattatttgttatggaaagtgtaaaatttttgagattttaaaagttagattttttttttttggagatggagttttgtttt

SEQ ID NO: 344 - DNA, 6432 bp, Artificial Sequence
  chemically treated genomic DNA (Homo sapiens)
agagtgagattttgtttttaaaaaaaaaaaatttaatttttgaagttttagaggttttatattttttataataaatagttaagaatttttatttttgtatgtatatatatattaatattatatatatttatatatataattatatatatatttatatatatataatatatatatatatttttttatttttattttttttttaaaaatttttagagatagtgattaggtgggtagtttagttaggattttaattttttggtttttaataaatgataattgtatagaattattaattttttgaagataggattattttgttttaggtaaaatttatagtttttagtatttagtaggtatttagtgagggatttttggttttatttgagtatttttattttttatttatttatgttaaggtgttagtggagttagttaatttttttttggaaattgattatttttttgaaatttgtttttaaaaattttgggttaagaagttggtttgagggaaagtgtggttgtttttaggagttaaggattgaggagttggttttttgaatgggtggtttaaaaagagttgggtgggtatgtggtattgttatgggtggagtggtttaggtgtgttggttgttttggtagtttaggttgttgttttgggttgttgttttttggttgtttttagataattaattttttaaatttttttttttgggggtgggggtttgttttgaatgtggttaatataatgttttttttgtttgtataaaggggattaaatgtgttttgtgttttttgtaattgaatttttttttttttttttaagaaaaatttataatttttgtagttatgggagttgggttgtgtgagtgttgtgggggaaattttttttgtttttgtttgggggttgggttgttgggtttgattgttaagtgtagtggagaggtggggattttaggaagatttttggtgttttgttgagtttgggttggggattatttatttgatttttgaatgtgtggtgggattgtgttggtgatatgtgtttataggatgatgtgtagtggttataggtttttgagtagtttttgatttatggtagattttgttgtttgttatagattgagtttttagtgtagtggatggtgtttttttggatttttggttgtgtttttgtgttgtgttttttttggattttgtgttgggttggtagtgtagatgtgtgggttagatgtggtgtttgtttgttagttaggagggggtttggaggttggtgaggtgtggggaggtttttggtggttgagggaagttgtataggagtttggtttttgttttgagtgggtgtatgtgtgggggtgttgttgttttgtgtgtgtgagtgatttatttaattttaatttagtgttgtgggggaaataggaaattttttgttaatagttgggtaggatttttttttgtttgagagttttttttttttttttgatgtttagtttttagtttttttgtagttgttaattatgttttttagattagtttttttgagagttttggttgatttttagttgttttttattgtttttttatattatttaggagttttttgttttaagtatttatttaagaatgattaagtgtatatagtttataaagtaataatagaaaatgtttatgttttttttagtagattagaatatttgttgtttttttttagttttttttagattgtttttaggtgttttagagatgtgtttttaaattgtaagttgagatttaggagtgaatattttaatttattgagttgtgagtatattttttttttaaataaaatagtaatggtaaattttattttattaaatttgtgttttagttgtgtttatatgtatgtatgtatgtgtatatattgttaagttgtaaaatgtttttttttaggttgaagtttagaggttttttttaagttttaatgtatatattgattatttggaaattttatttaaaaatgtagattttaatttagtaggtttaggaggtaggtagagattttgtatttttaatgagtatttggatagagtgttttattttgtattgtttttttttgggattgagttagtgagtaattgtaaatgattatttattatgaagtgatagtggtgggaaatgtaatttttagaatgtatagagtatagtagaaattgtaaaattaaaagtgggttgggagttatttgaatgtttgtgtttttatttttttaatgtaggtgaagaaagagaatatttatttttttatgtgtaaatggggtaatatgggagtagaatagtataaatttttaaatttttttttttgttagggtaattagatttgtttaagatatttttggtgtatatgttttgtagtttaaatattaatagaatttttttttttttttagatatgttttgattggataataaattatgtgattaatttattttttatttttaaagatatgattttgtatagttttttggttagtagattttttagtaatttatttaatgaatttttttatttgagaggaagattgtagaggtaagggtttgtgttagggtttttagggaataaaggtaaatagtttttttttaaatttaatttttaaattttttttgttattttaagtgtttatttgttttattttggaattttaatttatgttttatttagtatttaagttgtttttggatgttttgttattttttagtatttatgttgaagatgtagaaagtgtagtgaaattaggagggttaggtatttttttttttattaattaattgttttgttaaagttggagtgattttgttaatggaggaagattgagttttaaattttttttttatttttttttttgttattagtttatgttattgttatggtttgtgtaggagttttttatgagttatttttagttatggttgttttgggtttttttatttagttttttaaatgagagttgaatttagttttttaaaatataaaattagttatattaattttttgattaaaattatttaatggttttttattgtttttgagataaagagaagataaaaattagatttttgaatgtgtttttaagtttttaatttttttgtaaatttttatttggtttttttttgtttattgaaagttttttttaaattttgtgaatatgtttttgtaatttttttattttttatgtttagagttttttttagtgtggattttttttttttgatttttttttttttatttagttaatttttggtttttgtggattgaattataatttttttgatgggtaagtttttttttatttttatgagtagattttgtattatatgtttttttggtattatatgttttttttttaatagttgtaattttataattatttgtgttattttttaatttatatttttattttttatttaattttaaattttttgagggtaggtattatgtatttttttttttatttattattgtgtttttaagtattaaatatataattgatgtttaataaatatttgttggatgaatgaatgaattaggtaataaagatttagaagaaaattgtatttgattgttttagttgttttataattttggagaaaatattgttattgaatatttgagatataaatagattatattttagttgagaatgatgttattattattttttttttttaagaatggagaagtatgtgggtttttttttttttttttttttttttttatatttgtttaagtttttttagatagtaaatatgtatttttttttttttgaaaatataatgtggtaaataaatgtttaatagattttaaaagttttgttttttttaattattataaagatgttttatattgttggaggttagatatttaaatttatggtggaatgtttaattggtggtttttgttatgatatattattaatgttgattttaattttgtttgtttttaatatttttgatttaatttttagttttttgtgaaattgagaagaattagaatttagtattgttaagtgtaagttagttttttgaaaattattataataaaaataatagatgtgtaaatttatgtatattgtaatttgataattttaaaaatttattaggttgagtgtagtggtttatatttgtaattttagtattttgggaggtttagatgggaggattatttgagtttaggagtttgagattagtttaagtaatatagtgagattttatttttattaaaaaaaaaaaaaaaaaaaaaaaagttaggtatgttggtatgtatttatagtgttaattatttaggaggttgaggtgggagaattatttgagtttaggagatgaatgttgtagtgagttatgattgtgttattgtattttagtttagaagatagaatgagattttgttttaaaaataaaaaataaataaaagaaaaagaaaaaaaaattgttatgatgtttttttttttgaaatttttgttgaaagggatgtttgatatttttaattaagatattatttttatatatagttgtatatttggtttagtataatattttgtgtatttatataagtagttaatatatatatgtaaaaaattgggttatttgtaaatgggaataaaaaaataatagtttgatttagggtttaaaaaataaggaaggtaatgtttaagtttttaatgagttgaaaaataataaatattaatttgaatagaaattttaaaagttgataatttattttattagttttttaaattttgtatgtatatataaatatatataattgaattgaattaaattgtggtttatttaaatgttgggttttttagttgtgatgagagaagaattttttatttttttgagttttgtgatatgtagttgttgaggttattgttagttagagtagttaatagggagatttttttttttataaattaattagttttatttttagtttttattttttgattaattttttttttattgtgaagtaaattaataagtattgagattgtagttaatttgtgagggttatttattttttgtgggttatttatgatgttattttttttaggaaatattttgtgatgttttatttattgtgattattttttttttagggataatttagggaatattttgtttatttagtttttttttaaaaaaaaatgtttgttttattttaatatggagtatattattgttatttatttgttttttagaattttattttaatgattgtaaagtttttaaaagtataaaatattttttttttaatgtagaattatattttgtgttttatagataattagtatttagtgtgtgttttttgtttttaatagagagaaaaataagaatattagtttttttaatttatttttttgtttgtagttttttatagatattaatagaatttgtaattatgttatatgtttatagaaagtattaatagtatgttttgaaaaaaataattttttgaaaattataagggtaatatgtgttaattataggtaggaaatttagattttttttttaaaggtagattttaaaaggatttttaattttattatttaaagataatttttgttaaattttggagtatgtttttgtagtattattttaattttttttttataaatgaagaatttgaggattaaagagattaagtatttgataaaggttatatagttagtaaaagatagagtttagatttgaatttagttttgtttagttttagatttgttttatattttagaataaattgattaggtggttgatttttgttatttgattagtgaaggattttaggaaatgttattttaaaatatgttgttttggtatattgattatttttagttgaaggtatttaaagattagtaaatgtagggaggaggagagatatgtggaatagatgtggattaattttttgattgaatttaagttagatttttattagttaattttaagtttatttttagttaatttatatgagtttgagtaagaataagtaaatgttgtttaaggaaaaatttgggttggtttgttatttagaatttttgaggtaatagttaagagatataagggatgtgaagggtgaggaattatggaaaagtaaggttaaataatttgtaggtggtaaaattataaaggggtttttatagataaaaattattatgaggtttgttatgggggttgaagatgaggaagatagtaggattttaatttagatttttaggattatttataaattaaattgtatatatagttaaagaatatgggttgggtatgttggtttatgtttgtaattttagtattttgggaggttgaggtaggtagattatgaggttaggattttgagattagtttgattaatattgtgaaattttgtttttattaaaaatatgaaaattagttgagtgtggtg

SEQ ID NO: 345 - DNA, 7309 bp, Artificial Sequence
  chemically treated genomic DNA (Homo sapiens)
atgtgattaatggtgttaattgttttttggattgtttttatagtataggataagattatattagttttagtaggttttattgaagaaagtttatgtgttttgtagaaataagatttttagtttagtttaataggagattaattatatgtttattttatttttttttaaggtatgatagtatttggttgagatgtttgtgtgtattttttgtgtgaagttgagtatgtaatttttaaagaaattataaaggagttatttgtttttaaaggaaaaatatatgaattttatgggtataaggaagatattaaaatagggttggggagaagtttttttttttttattttatagtattttttatagaaataattgattgtttgaatatatggttattgaaatatatatatatatatatatatgtatatgaaaataagagttggaatatttgattttgttttttattttttattattttagataatataggatataatatggttttattgtatatatgtgttttttggtttaaaaatattgagagtagatttttgtggaaagaaatatgaaaatttgaggatttatgtgaatgtagttagaggtgaatgtagttagaggggtttttaatttgttggtagagttgggggagagttggggtaattttattgttatgaaattggttttagatggaggtaaggaaaggtgtttattttttgttggtgttagatatagagagattttgtagtattttgtattttaggtttagaattgtttagtgttgggtagtagttttattgagggtttggttagagtttatggggatgggtggattaggttgtttgttgtttggaaaaggttattttgaatataatgatttttatatggatggtggggtttgggggaaggtattgtggttagggtttggaggggaagagggaggaaagtaaagaggagtttttttatgaggtaatagaaatgatagtattttttttaggttgaatttttaaaatttagttttgttttggaagattgggattgtggtattttttgtagtgtttttagattgttttaaggtttttaaattaatgatttataattatgttgtttttttagagagtatttttttttttggttgatatgtggttagtttaggggtggaggagttttggtagttatgaatttagatgggatgttgattgagagttttgtggttatggtagatgggaggggtgagttttatttatttaaaggtatttgtattttattgatgagtgtggaattgtgtttttttgtttttgtagtgagatgattgattaggattgtaggttgagtaaatgggtgttttttggtttatagtgttttttagtattagttagtgggatagagttttgtgaattttttaaggagttattatttgtttgtttgaatgttggaaaggggttggtggtgttgattattggatttatttaattaatatttattaaatttgttgttattaatatttaatttttgtgttttaggggtttagattttagtaagggaaatagatgggtaaataattatattagagttagttaagtattgttaaagaagttgatatagggtgttgtggggatatatgggaggggaattagaggaggttttttggaggaggtgatatttaagttgaggtttgaaggatgtggaagagtttagtaatttttgaagattaaaaaaatggtgataaaaaagatatttttttaattttttagtgttatgatttaagagataaataagtaggtgaatgtataattatattgggttttattataagttagagtttgttttttttaggattttggtattataattttttttgaaattttgtttttggtattgatttttgggggaggtagtaatataggaatttagtgtttgttgtgaaattgatggatggtttttagttttgggtatgtttttatgtgttaaatttgtttaaatggtaggatttattttttttttagaagtatttatttgttttataggattttttatggaattttggagtttttgaggtgagagggattttggatattattgagttttattttttatttaataaatatagaagtggatgtttggataggtaaagtgatttgattaaggtaggtgtatagttattttgtaatattgggaataaattttaggttttttgattttttgtttttattttattttttttttattttttagaaataaagtttttatgtgtttttttttatagtgatatgtttggaatgtattagttagtaatttaggaagggaaaaaaataaatatataagagataaatttgttaggaggataaatttgtattgtttttgattggtttagagggtgattattattatggtagagaattatttaattagtgtaagtaaaatttttttgtgggttgggtattgtataaagatttaaatgaatttgtttatagatttgaaaagtagatatgagatttgtgaatggttggggtttttaagtttatagtataagtatgggttatattttatagtttggaggattgagttttgaaaatgggtaagtttttttatttttttgaattttattttttttatatttaaaataaggatgagtagtttttgaggttttttttatgatttttttttttatagattttagtattttataatttgatataaagagggtggatatgaatttattttttttagaaaagttttaggaaagagaatattaggttattttagtaggtgtgtagataggttagatagattttgaaatttatttagttttttttagatgtataattttattattgtttttagttgttaagagaaagtaggagagtttgtatttttattttttttttttttttttttttttttggagatggagttttattttattatttaggttagagtgtagtggtatgattttagtttattgtaagttttgttttttaggtttatgttatttttttgttttagttttttaagtaattgggattataggtgtttattattatatttggttaattttttgtgttgttagtatagatggggttttattatgttagttaggatggttttgattttttgattttgtgatttgtttattttggttttttaaagtgttgggattataggtgtgagttattgtatttagtttgtatttttatttttattgttagttttaggtttattttatttagtttattaagtgatgttgaataattaatttttatatattattaggtttatggatattatgatatttagattgatgggtgtttgttgaagggggtgattttagtaggaggatttttttatgtaaggatttatggagtttgttgttttttttttttagggtgagaattaaattgtttttatatggtgggtagaggggaattgatttaggtttggaataagagagaatattttaattgaaaagtttttggaatttgttgaattttaagatattgtgtggattagtttaggatagggagtgagaagaaattaattaaaaggtaattttgttattttttagttggaaaaaagattagattatatttgtgtttttataattaagtagttgttggaaaaaaatgttttagatgttttttatgagaaaattgttgtttgaagtttagtagaagttatttatttgatatttatattttaggtaaggttttttgttggagaaaatattggtattttggataaaattgaaatgtgaaaagaaagggaagagagggtttttattatgtaagatgtttatttaaagtggatttggtttggaaagttttttaaaattttttatatgattgtggaataagttatgtggggtgtggggataagtgaattttttaaattttattatgtatgtttttatttaatttggatttttagagtggtttttagggtattttgtttaggatttagttagttgttggttatatttatgttttttagttttttgagattttatttggttttgagagggttaaaaagtagtgtggttaaatattttaggttttaaagtatttttattgtggttggggaagtaatagaattatattttataaaataatgaaaatagtgttagaaaaatattgagagatagaaatatttttatgagttaggttatagttagagtgaaggtagggaaggtttttaaagttgggtggaggggataagttaaaaagatgtggaaattggttttttttttttatggttaaagtgtttaaaggggaaaaaggagttttaaaaatgtttttggaaatattattttttatgaattttttggtttttgttgttttaatgttatttgtttgagatgtaaatagaggagttttgagaaagaagttgaatttgtatttttttttgtttttatttgttttaaatttgtggtatttttaataggatgaagtggaagagaaagggaaagagataaaagtgtagaaagatggaagattttagttgtaaatggttatttgtagttagatggaatagttgttgatgtttagggaaatgtatgtttttttttagatgggaaggagtagtggaaaggggtgatgagtttttggttggttattaattattttatttttttgtgttggttttttatttggaaagtgggagtgatatttgtgtttgttttttttatttataaagattattgtgagagttataatatggtgagatatagaattttgtttttaaaaatataaagtagaattaagatgttaataataaggatagtaattgtgttagttatttgtaattatttattatagttagttgtttaggattttggattgtttttttggttttattatagttttggattagtttatttttaaattttttgttgaagggtggagttttgttagttatgggtagggaattatttttttttgtttttttattttttgttttttaaatatgtttagggtttttgtatttgttgttttttttgtttggtattttttttttgtggtttgttttagagttgatttttgtttttgtttattttttagtgaggatggtattttagggagttttttttttattattgtagagagagtaggttttttttagttatgtttaatttagaattttgttttgttttttttatagttttagtattatagaaaattattttgtgtatttatggatgtttatgggggtaagggttttgtgttgtttaatttagtattttgaattgtgtttgttgaatgaatatagaattttgtttgttttgggagagtatagaaaatagttttttattatatattatagttagttgtaaatagtagatggttttttatattttagagagtaagaattagagagagagagaaagagagagagtttgggttttttttttttgtgtttgttttttttagagaaattggaggggtagtagttagtatttttttgttggttttattaagtatagttaaggtttttaggatatggttattttttatttgtggaagtggttttgttggggtgggtgggtgttagttggttttggtttgggttagagatatttagtggtttaggtgggtgtggggttagggtgtagatgagaaggggtatgagggttttgttttgaggatttagtggtaagtattggttttgggtgtgttttagtttatttatttgtgtgtttatggtggtattattttttataaggatttgaatgatttgggggtggttttgttttgttattttttgtttttggttttgttttttttttggagggttgatgaggtaatgtggttttgttattggtttgagggggtgggttttaatagtttgaggtggggtttttgggggtttagtgttatattatttggttgtttaggtagtggtgtagagtgggtagtaggtaggtggtgggtgtttagatggtttttttttttttttttgtttttttagtttttgtttttttgttgggaggttgtttgttgagttttgtgttagtgttgaggtagttttgttgtgttttattttgttttgttgggtatttggagggtagtgtgttggaggttaaggttgttttgtatggtttggtgggtgagtgagtttgggttgtagtagttttgttggtggtgtgtatggtaattttggagaggtgagtagtagttttggtagtggtggtagtagtggtaatgattttttggtttgggtttattgtgtttttgggtagttggagtttgggggattggggtgttgaggtgtgtatatgtttgtttagttatttttaggatgttttttgtaattttgatattggtaagtgtttttggtgttttgtttgagttttatgttgtagttaggattgtagtgttgtttagggaggtagggtgagttttattttttttttttgttttaggagaggggtagatggggttggggtggagtggagaaatttgatgtttttgggtgggggtgttggtatagttgagaggggaagatgttttgtagaggaaatttatagtggttgagggagtttttggttgtttttgtttttttaatttaggttgtgaggtttttattggtttttttgatatttggaaaatgtttttatttattattaatggaggaagggttagaagagaagggtggggaaagggtttttaaaatttggaatgttaattaaagtgttgggaaattgaatagttaaaaaaaaaaaaaaaagttgtttgttatgtgtatggaaagttgtaggagaaatttggagtattttgagtttgtattattttttgtgtttatgaaatttattttttttattgagatttaatttagttgtaggttttttaggtaagtgttaattgagtttttgggattgttaagtttgggtggatttaagggggaaaatgaggagaaagttgtggtattgatttatgttttggaggtattgtgtttgagagtgttgatagttagtagaaggtgtgaggggttatttattatatagttgtgaaaatttataggaaggttattttttttttttttgaatgtgtgtggggagggggagaatgggtagtggaaaatagatttgttattaaaagaataaatttgttaagggttatattatggtgatagttttagattggatttagtgttttgagtagagagattttgtaaagagattttttattttttagtgtgtatggagggttttgagagtattttgggaggtttgtttgggagtgtttgggatatttgtgtttggatggttaaaggtggagtggtatttgggaaatatttttttttttttttttagtttataaag

SEQ ID NO: 346 - DNA, 7309 bp, Artificial Sequence
  chemically treated genomic DNA (Homo sapiens)
ttttatgggttggaaaggaggagagagatgttttttagatgttattttatttttagttatttaaatataagtgttttaaatatttttagataagttttttaggatgtttttggggttttttatatatattaaggagtaggaggtttttttatagggtttttttatttaagatattaagtttagtttggaattgttattgtgatgtgatttttggtaggtttgtttttttggtgataaatttgttttttattatttattttttttttttttatatatatttaagggggaaaaaaatagtttttttgtgaatttttatagttatgtggtgagtgattttttgtattttttgttggttattaatatttttaaatatagtgtttttagggtgtgggttaatgttatagttttttttttatttttttttttaaatttatttaaatttggtagttttagaagtttggttagtgtttgtttgggaagtttgtagttgggttgggttttagtgaaaagaatgaattttataggtgtaggagatgatgtagatttggagtattttaagttttttttgtaattttttgtgtatatggtgggtaatttttttttttttttttaattatttaattttttagtattttagttagtattttaagttttgggaattttttttttattttttttttttagttttttttttgttagtagtgaatggggatattttttagatgttaaaaggattggtaggaattttatgatttaagttaggaaagtaaaggtggttaggggtttttttagttattgtgagttttttttgtagggtattttttttttttagttatgttagtgtttttgtttaaggatattgagtttttttattttgttttaattttgtttgttttttttttggggtagaggaaaggagtggggtttgttttgtttttttaagtagtgttgtagttttggttgtagtgtggggtttgggtggggtattaggagtgtttattgatgttggagttgtagaaggtgttttgggggtggttgggtgagtatgtgtatgttttggtgttttagttttttaggttttagttgtttaggagtatgatgagtttgagttaaggggttattgttgttgttgttgttgttgttggggttgttgtttgtttttttaaagttgttgtgtgtgttgttggtggggttgttgtagtttgagtttgtttgtttgttgggttgtgtggggtaattttggtttttggtgtgttgttttttgagtgtttggtgggatgggatggggtgtagtgaggttgttttggtgttggtgtaggatttggtgggtggttttttggtgaaggagtaggagttggaggagtaagaggaggaggagaagttgtttgagtgtttgttgtttgtttgttgtttgttttgtgttgttgtttgggtggttgagtgatatagtgttgggtttttggggattttgttttgggttgttggggtttgtttttttagattaatggtagagttgtattattttattggttttttaaaaagggggtggggttgggggtaaggggtaatggggtggggttgtttttggattgtttagatttttatagggaataatgttgttgtgggtatgtgagtgggtgggttggggtgtgtttgggattggtgtttgttgttgggtttttggagtggagtttttgtgtttttttttgtttgtgttttggttttatgtttatttgggttattgggtgtttttgatttaaattagaattaattaatatttatttattttagtaggattgtttttataggtgaggggtggttatgttttagagattttgattgtgtttggtggaattagtgggggaatgttaattgttatttttttagtttttttggagagagtaggtatagaggagaaagatttaaattttttttttttttttttttttttggtttttattttttgggatatgggaagttatttgttgtttgtagttggttatgatatatgatagaagattgttttttgtgtttttttagagtaaatggggttttgtatttatttaataaatatggtttaggatgttgggttaagtaatataaagtttttgtttttgtggatatttatgaatgtatagggtgattttttgtgatgttagggttatgaagaaaataaaatagagttttgggttggatatgattggggagggtttgttttttttgtgatagtaagggaagggttttttgaagtgttatttttgttgagaagtggataaagataaggattagttttggggtaagttataggagagaggtattaggtagggggaatagtaagtgtaaagattttgggtatgtttgaaagatagaaagtagaaaggtaagaggaagtggttttttgtttatggttgatagagttttattttttagtaagggatttgggggtgagttgatttaaaattgtagtaaaattaggagaatgatttaggattttagatgattagttataatagatgattgtagataattaatataattattatttttattattgatattttgattttgttttgtatttttaaaagtaggattttgtattttattgtattatagtttttataataatttttgtgggtaggaaaagtaagtataagtattatttttattttttagatgaggaattggtatagaaagatgggatgattggtggttagttaggaatttgttatttttttttattgtttttttttatttgaagagagatatgtatttttttgaatgttagtagttgttttatttaattgtaaatggttatttgtagttgggattttttatttttttatatttttgttttttttttttttttttttgttttattttgttagaaatgttataagtttggaataaatagaaatagggagaaatgtaagtttagttttttttttagaatttttttgtttatattttagataagtgatattgggatagtagaggttgaagaatttgtgagagatggtatttttaagaatatttttgaaattttttttttttttttgagtattttagttataggaaagggaaattagtttttatatttttttgatttgttttttttatttagttttaaaaattttttttgtttttattttaattgtggtttaatttgtagagatgtttttgttttttgatgtttttttagtattgtttttattgttttatggggtatgattttattgtttttttaattatagtaggaatattttgaggtttgggatatttagttatattgttttttagtttttttagaattaaatagggttttaggagattggagagtatgggtgtggttaatagttgattgagttttgagtagagtgttttggaggttattttaaggatttaggttgaatgagggtatatgtggtggaatttgagagatttgtttatttttgtgttttatatgatttattttatagttatgtggaaggttttagaagattttttagattaaatttattttggataagtattttatatgatagaggtttttttttttttttttttttatattttagttttgtttaaagtgttgatattttttttaatggaaggttttgtttggaatataagtattaagtagataatttttgttgaattttaagtagtagtttttttatagaaagtatttgaagtgtttttttttagtagttatttaattatgaaagtataagtataatttgattttttttttagttgaaaagtaatgaaattattttttggttaatttttttttattttttattttaagttggtttatatagtgttttgaagtttagtgaattttaagagttttttagttgggatgtttttttttattttaaatttgagttagtttttttttgtttattgtgtgaaggtagtttggtttttattttaaggaaaagaaatagtaaattttatgaatttttgtgtaggggagtttttttgttagggttattttttttagtaggtatttattagtttggatgttatggtgtttatgagtttaataatatgtaagaattggttatttaatattatttaataagttaggtggggtgaatttgaggttaatagtaagaatgaagatgtaggttgggtgtggtggtttatgtttgtaattttagtattttgagaggttaaggtgggtggattatgaggttaggagattgagattattttggttaatatggtgaaattttgtttgtattaataatataaaaaattagttaggtgtggtggtgggtgtttgtagttttagttatttgggaggttgaggtaggagaatggtgtgaatttgggaggtggagtttgtagtgagttgagattatgttattgtattttagtttaggtgatggagtgagattttgtttttaaaaaaaaaaaaaaaaaaaaaaagaatgaagatgtaggtttttttgtttttttttgatagttaagaataatgatagagttatatatttgggaagaattgagtaagttttaagatttatttggtttgtttatatatttattaggatgatttggtatttttttttttggaatttttttaggaaaggtgagtttatatttattttttttgtattaagttataggatgttagagtttgtaggaagagaagttgtaaaaaggattttagaaattatttatttttgttttaaatgtgggaaaaataaggtttagagaagtgaaggaatttgtttatttttagggtttagttttttaagttgtaaggtgtggtttatgtttgtattgtgggtttggaaattttagttatttatagattttgtatttgttttttagatttgtagatagatttgtttgagtttttgtatagtgtttagtttatagagaaattttatttatattgattaaataattttttattatgataataattattttttgagttaattagaagtaatataggtttgtttttttgataggtttattttttgtgtgtttatttttttttttttttaaattattagttaatgtattttaaatatattattataaaaaaaagtatatgaaaattttgtttttgggaaatgaaaagagagtaaagtggaaataaaaaattaaaagatttgagatttgtttttaatgttgtagaatagttgtgtatttgttttggttaagttattttgtttgtttaggtgtttatttttgtgtttattggatgaaagatagaatttagtggtatttaggattttttttgttttaaaaattttaagattttatggggaattttgtaggataagtgaatgtttttgaaggggagatgggttttgttatttaaataggtttgatatatgggaatgtatttaagattgaagattatttattagttttgtaatgaatattgagtttttatattgttattttttttaagaattaatgttgaaaatagaattttagagaagattgtgatgttaaagttttaggagagataggttttggtttatggtggagtttagtgtagttatgtgtttatttgtttgtttgttttttggattgtagtattaaaaagttaggaaggtgttttttttattattatttttttggtttttaggagttattgaatttttttatattttttagattttagtttagatgttattttttttgggaaattttttttgattttttttttatgtatttttataatattttgtattaatttttttgataatatttagttgattttaatgtgattatttatttatttgttttttttgttggagtttaagtttttagaatatagggattaagtgttggtaataatgagtttaataagtattggttgaatgggtttaatgattagtattattgatttttttttagtatttagataggtaggtggtggttttttggagagtttatggagttttattttgttggttggtgttagggggtgttataagttagagaatatttatttgtttagtttgtagttttggttggttgttttattgtgagggtgggagagtataattttatatttattggtggggtgtgggtgtttttgagtgggtgaagtttattttttttatttgttatggttataaagtttttagttaatattttgtttgggtttgtggttgttggagtttttttatttttgagttggttatatgttaattaaagggggagatgttttttggggaagtaatatagttgtgaattattggtttgggggttttagggtggtttgggaatattgtagaggatgttatagttttagttttttagggtagagttgggttttggaaatttaatttggagaaggtattgttatttttgttgttttatagggaagtttttttttgtttttttttttttttttttttagattttagttatgatgtttttttttaagttttattgtttatgtgaaagttattatatttaaaatggttttttttaagtaatagatagtttggtttatttatttttatgagttttggttagatttttagtggggttgttgtttagtattgggtaattttgagtttaagatgtgaggtattgtaggatttttttgtgtttggtattagtagggggtaaatatttttttttgtttttatttggagttaattttatggtagtaaaattgttttagtttttttttagttttgttagtaaattgaagatttttttggttatatttgtttttggttatatttgtatgaatttttaggtttttatatttttttttatagggatttatttttagtgtttttaagttagaaaatatatgtgtgtagtaaagttatgttgtattttgtgttatttagggtggtgggaaatggaaagtagagttaaatattttagtttttgtttttatgtgtatgtatgtgtgtgtatgtatgttttaatgattatatatttaagtagttaattatttttgtgaagggtattatgaaatggaaggagaagaatttttttttaattttgttttaatgttttttttatgtttgtggagtttatgtgttttttttttaaaaatgagtagtttttttgtggtttttttgaaggttgtatgtttagttttatatagagaatatatataagtattttagttaggtgttgttatgttttgggagggaatgggatggatatgtggttggttttttgttagattgggttggaggttttgtttttgtaaggtatatgagttttttttagtggaatttgttggaattgatatggttttgttttgtgttgtggggatagtttaaagagtagttaatattattgattgtat

SEQ ID NO: 347 - DNA, 15863 bp, Artificial Sequence
  chemically treated genomic DNA (Homo sapiens)
agttttaattttgtaggtttaagtgatttttttattttagttttttaagtagttgggattataggtttaatttttttgatagagataggatttggttgtgttattaaggttggttttaaatttttgggtttaagtatttttttattttggttttttaaagtgttgggattataggtatgagttattatattagttataaaaattttttgaatataaatttattggttaggagtagtgtttatgtttgtaattttagtattttaggaggtgtaaatgggtggattatttgaggttgggagtttgagattagtttggttaatttggtgaaattttatttttattttaaatattttaattagttgggtgtggtggtgtgtgtttgtaattttagttatttaggaagttgaggtagtagaattgtttgaattgggatatagaggttgtagtgaggtaagattatattattgttttttagtttgggttatagagtgagattttgttttaaaattttttttttttaaagaaagttaaaaagaatataaattgattatttgtattgtaagatatattttttaaaatgttttaatattataattattaatattataattatgattttgatgaattatttttgagagttgaaaatttgatagttgttattattgttttagaaagtagtataaaaaagaaagagtgttgatggaggaggagaaggtttagtagagttttgagtgtttgagtgttttagtgtagggaggtggagatagtgatttatgttgttaagagatgtagtgaggtgaatttagagaatgatttaagaggggttgggtgtggggtttatgtttgtaattttagtattttgggaggttgaggtaggaggattatgaggttaggagattgagattatggtgaaattttgtttttattaaaaatataaaaaattagttaggtgtggtggtgggtgtttgtagttttagttatttgggagaggttgaggtaggagaatggtgtgattttgggaggtagagtttgtagtgagttgagatggtgttattgtattttagttgggtgatagagtgagattttgttttaaaaaaaaaaaaaaaatattttttttatgattttttaaataaattttaaatgttttatttataagaattaatatgatgtggttgtttttttttgtttttatttttttgttttttttatttgttttagtttggttatattagtattttgggttttttgttttgtgtttgtttgtttgtttgtttgtttgtttgtttgttttgggatggagttttattttgttatttaggttggagtgtagtgatatgattttggtttattgtaatttttattttttgggtttaaatgatttttttgttttagttttttaagtagttgggattataggtatttattattatatttagttaatttttgtatttttgtagagatgaggttttgttatgttggttaggttggttttaaatttttgattttaggtgatttgtttattttagttttttaaagtgttgggattataggtgtgagttattgagtttagtttgttttgttgttttttgagatggagttttattttgttgtttaggttggagtgtagtggtataattttgtttgattgtagtttttattttttgagtttaagagatttttttgttttagttatataagtagttgggattataggtgtgtgttattatatgtgtttaattttggtatttttagtagtgatggggttttgttatattggttaggttggttttgaatttttggttttaagtgatttgtatattttggttttttgagtagttgggattataggtgtgagttattatgtagggtttttttggttttttaatgtataaagttattttttagttttgggtgtttatagtattattgttagtttttggaaagttttttttagaagtttttatatgattgattttttatttttttttaggttttagtttaaatgttttttttttagagagtttttttttgattattttatgtaatgtgtttttttttagttagtttttttttattttgtgtattttttttagagtatttattattattttggttttgatgtttgttggtttatatgtttgttgtttgttttttatatagaaagtaaattagttttttatttgttttgtttattattttattttagtatagtgattaatatatattagtagttaattaataaatagttataagttaggtatggtgatttatatttgtgatttttgtattttgggaggttaaggtgggtggattttttgaggttaggaatttgatattagtttgtttaatatggtgaaattttgtttttattaaaattataaaaattagttgagtgtgatggtgtgtgtttgtaatattagttatttgtgaggttgaggtaggagaattgtttgaatttgggaggtagaggttgtagtgagttgagattatattatagtattttagtttgggtgatagagtaagattttgttttaaaaaaataagaaatagaaatatatatatgttgttataagaaatttattattttttagtaaaaaatatagatttttaattaaagaaaggggaaatttttttttaaataattttagaatttggggtagaaaatgttatatgtggaaatttgttttgaaaaatagttttgtttgtgaataggaaatatttggattatattttttttatttttatgaaggatttaaatgtgtagtattgatgaagaggtagttagttttagtttttattatttttgtatattttatttgtttttttttatggtatagttttgggggtaggttataaatttgtaagatgttattagtattattggttaagatgtaggaattgttaggagttttagaaataggggagagttagaaagttggttagatttatgttttttaagtgtagggttagggttgagtttgtttttggggtaggtaagtttttttgaatttttgagggaagtagaagatataaattgttagataaaatgtaagtttagtttaaaagggttatgtgttgttttttttagttttggggtattttttttttagaaaattggattgttttatagtgaaaattttgggggtggttagttttttgttttgttgttatttttattatttatagttttttaagaagtttttaggttgggtgttgaattttgattaggaattattgagaaattgaggtagttgggagaagttgtagttttaagtgttgaaaggaagatgggggataataaatttgggttgttaagtaaagggggtagaggtttggagaagtgggttttaggattagaggatagattgattttatattttatttttttagattttatattttattgttattattatttatgtgttttttttgttttttgtagtgggttttttagaggtattttttatggtttttttagattttaattttggtttgtttgttttttttttagaaaggtttttgtttgttttttttgtaggaaggtttgtatttttagaaagtttttgttttttgatttgaggatttaatttattaggggaattaaattttgtttttaggggagtggagagagaaattgggttttttttttgtagtttttgggatatagttgagttagttataggatttggggataattggggtggatttttttttttgggaggtggtggtattagtttagagtttgtatttttatttattggggaagtgtggggagaaggatgggttggagttgggttttggtttgaaggatagtagtttggagttaatggttgagtttttaaagtttttatattgtagaggaagtatagtggagattagttttagttaggatggttttgaagtttttagggatttgatgtagagttaaagaaatttatttgtgtttttttttttttttgggagtaggtagaagatttttgggaggagaggtgaatagtggatgttaatttttttgaaagtattgtgttttttagtattgtgggttgttatgggttttttgttgttgtgggattttggtttattttttgattgggttgttgtattttggattagattttgtgggtgatttatggaatttgtggagttgggatgtgaaaggttagaaggttttttgtttttattaagttttagggttttttgtggttgttgggagttgtagtttgaatgtttttattttggtgagaagtgtttatgttttttttattgagttttgtggtaatttttaaagtatttgtattgtttttttgttgtttgtagagggtgtagtaggttttgtattttttttgtattttattttttaggttttagatttgttttttttatttaaaaaatatttattattgagtttttatttgttatttagtattgatataggtatttaggaatataataatgaataagatagtagaaaaattttatatttttataaggtttatgtttttatgtattgaaagtaatgaataaataaattttattagagtgataagggttgtgaaggagattaaataagatggtgtgatataaagtatttgggagaaaatgttagggtgtgatattatggaaagtttttttaaaaaatgatattttaattgatgagaagaaaggatttagttgagagtaaatgtaaaagtttttttttttttattttttatatttgatataatgtaggatttttttaaaatgatttttattaattttgtttttatagttttggtttgtagaattttttattttaaaatgttagtatttatggtattaggttggtgagaattttgattttgtatttttttttttaattttattttttttgttttttttggtaggtggattatttgtttttatttgttatggtgattgtttagttttgtgttaggagttttgtaggggttgatgggattggggttttttttttttatgtgtttaagattggtgttaaaagttttgagttttttaaaagtttagagttattgtttagggagtaggtagttgttgggttttggggatattttgtgtttgggttgggagtgtgttttttatgatggtgatatgtttttttggattgggtaagtttttgattgaatttgatgagttttttttgagttatgggtttttggttttgtgtatttttagtttgggaaaattgttggggttgggggtggggtagtggggatttagtgagtttgggggtgagtgggatggaagtttggttagagggattattataggagttgtattgttgggagatttgggtgtagatgatggggatgttaggattatttgaatttaaagttgaatgtttaggtagaggagtggagttttggggaattttgagttggtttaaagtgtatttttttgtatatttatttggtgttgggtgtagggaatttttgaaataaaagatgtataaagtattgaggtttgagatttttggattttgaaatattgagaatttatagttgtatattttagagtttatggtattttagtgaaaattggggttttattttgaaatgattatttgggggtgatttggggagtttaagttgttaaggttttataatttttggatttttgttttttttggagtgatttttttaggtagtttttggttttgttagatggagaaaatttaattgaaggttgttagttgtggaagtgagaagtgttaaattaggggtttgtttgttaggttgaggaggattgttgtaatttgagaggtttggtagttttgttattgtttggttttatatttatatttttgttttttgtagtagtatttttggtttttttttgttggagtagtttattatttatttgatgagaggggaggagagagagagaaaatgttttttaggttggttttttttatttggtagagggaggttgttattttttgtttgtatttttttttttggattatttagttatggtttttgtaaaggtaggggtatttgttttgatgtaaattttaatttttttttttttttgaatggtgtgttttattttttgggttgtttgtaatttaggtggatgttattatggtgtagatagggagggaaagaagtgtgtagaaggtaagtttggaggtatttttaagaatgagtatattttatttttttggagaaaaaaaaaaaagaatggtatgtttgagaatgaaattttgaaagagtgtaatgatgggttgtttgataatttgttgggaaaaataatttatttgttatttagttttgggttaggttattttagttttagatgtaggttgaatgttgtgaagtggaaggggtgggtttgtaggtgtttgtgtggttttttgtgtagtttttggtttgagttggttttttttggtaggaggtggaatttgaatttattttttttgttgttttattttttagtttgtggttgttttattttgtagtttttttttatgtatttgttgtgtattggttattttgtgttgtatttatgttattttttttttaaattgaggtggtatttatatatagtgttagtgtatatagtaagtgtataggaagatgagttttggtttttaattgttttgtgatgtttattaagttatagattttttttattgttttagaaatgttttattatgtttttttttagttgatttttgattttatttttattttgatttttataattattttgtttgttggagaattttatatagaatggaattaggatgggtgttgtggtttatgtttgtattttggtttatgtttgtattttgggaggttgaggtgggtggattatttgaggataggagttttagattagtgtggttaatgtggtgaatttttgtttttattaaaaaatataaaaattagttgggtgtggtgggtgtttgtaattttagttatttgggagggtgaggtaggagaattgtttgaatttgggaggtagaggttgtagtgagttaagattgtgttattatattttagtttgggtgataagaatgaaattttgttttaaaaaaaaggggggaattatatattatgtgtttatttttgttgggtttttgttttttaatgtattgtttgatatttgtttatgttgtatatattagtattttgtttttttttatttagtatagtttattgattgtatatttgtttttttgatggttttttgagttgttttttatttgtggttatgaaataaagttgttataaatatttttgtataattttttttgtgattatatgtttttgtgttttttggagaaatatttaggaggggaattgtggaggaagtaaaaagtagttgtattttgaatttttttagaagttttgagttttttagagtggttgtattattttatattttaattagtaaggtatgggagttattatggttgtgttatagttttttggatattaggtatgttagtttttttaatgtggtatatttttgtggttgtaatttatagttttttattgattaaggatgtttagtatttttttatgtgtttattggttatttgtattttgtttgtaaagtagttttttgagttttttatttgttattttggtttttttgtttgtttttattgtttagttgtgggattgttttatattttttggatataagtttttattagatttatgagttgtgaatgtttttttttgatttgttgtgggtttatttgtttgttttatagagtttatagaattttaagaggagtggattaattttttttatgtttagtatttgttttgttttgtttaggatatttttttttttttttttaattttagggttatgaagatataattttatatttttttttaggatttttatggtggtaagttttatagtaaggtttttaagttattaattaatttttaaaattaattgtttatggtgtgaggtgtaggagttagtttttggtattttttttgtatggaaatttagttattttgtttttatttgttgaaataggttttttttttttattgaatgtttttaattttaattattttatagttggagtatagggttattattttagtgttattttttttttttttttgttaatttttgagatagggatttatattgttgtttaggttagagtataatggtataattaaggtttattgtagttttgaatttttgggtttaagtagttttttagtagttttatgagtagttgggattattttattatatttagttaattattttatttttttgtattgataggattttattatgttgtttaggttggttttaaattgttggttttaagtttttattttattttggttttttaaagtgttgggattataggtgtgagttattatgtttgattttttagtgttattttttatttattttttttgttttttgttttttttaaatgttggaggaagaaatagtatttattttatataaattttttagaaaatagaggaatagattgggtgtggtggtttatatttgtaattttagtattttggtatgttgaggtaggggattatttgaggttgggagtttgagattagtttggttaatatggtgaaattttatttttattaaaatataaaagtagttaggtgtgtattatatttgtaatgttagttatttaggaggttgaggtataagaattttttgaatttgggaagtggaggttgtagtgagttgagattgtgttattgtattttagtttgggtaatagagtgagattttgttttagaaaaaaaaagaaagaaagaaaaaatagaggaatattttttaatttgtttttgaagttaggataattttggtattaaaattaaataaggatattataagaaaagaaaatatagattaatatttttgttagtatagatatgtaatagttaattaattttagtaaattaaatttggtaatatagaaaaaaggataaataggttagttgtggtggtttatgtttgtaattttagtattttgggaggttgaggtaggtagattatttgaggttaggagtttgagattagtttgattaatatggtgaaattttgtttttaataaaaatataaaaattaggttgggtatggtggtttatgtttgtaattttagtattttgggaggttgaggtgggtagattatgaggttaggagtttaagattagtttgattaatgtggtgaaatgttatttttattaaaaatatgaaaattagttggtgtggtggtatttgtttgtaattttagttatttaggaggttgaggtagaattgtttgaatttgggaggtagaggttgtagtgagttaagattgtgttattgtattttagtttgggtgatagagtaagattttattttaaaaaaaaaaaaaattagttgggtatggtggtgggtatttgaaattttagttatttgggagtttgaggtaggagaattgtttgaatttaggaggtagaagttgtattgagttgggattatattattgtattttagtttgggtaatagagtgagattttattttaaaaaaagaaaaagaaaaaggataaatatattttaattaaataatgtttattttatgattgtagttgatttaatatttaaaaattggtttggtgtagtagtttaggtttgtaattttaatattttaggaggttgaggtaggaagattttttgagtttaggattttaagattagtttgggtaatatagttagattggtttttattggggggaaaaaaattagtttgtgtaatttattatattaataaagggaaatataaaaattttatgattattttaatagatgtagtaaaagtagttaatgatattaatatatatgtatgattataaattaattaattttttagtaaattagggaaaggaaatttaattagtttgataatagggtgtttatagttggagttttattagtagtatatataatggtagaaaatttagtgttgttgggggtggtggtttatgtttgtaatgttagtgttttgggaggtttaggtgggtggattatgaggttaggagattgagattgttttgattagtatgttgaaattttgtttttattaaaaatataaaaataaaaaattagttgggtatggtggtgggtgtttatagtgttagttatttgggaggttgaggtgagagaatggtgtgaatttgggaggtggagtttgtagagtttagattgtgttattgtattttagtttgggtgatagagtgagattttgttttaaaaaaaaaaaaaaaaaaaaaagaaaagaaaatttaatgtttttttttttaagattaggaattagaaaaggatttgatttttataatgttgatattatattggaggttttaattaggtaagaaaaagaaataatgagggttgggtgtggtggtttaggtttgtaattttagtattttgggaagttgagatgggtggattatgaggttaggagattgagttattttggttaatatggtgaaattttgtttttattaaatatataaaaaattagttgggtgtggtggtgggtgtttgtagttttagttatttgggaggttgaggtaggagaatggtgtgaatttagggggtggagtttgtagtgagttgagattgagttattgtattttagtttgggtgatagagtaagattgtgttttaaaaaaaaaaaaagaaaaagaaataatgattagtggtttgatgttttatgttagtaattttagtattttgggaggttgaggtgggtagattatttgaggtttggagttggagattagtttgataaagatggtgaaattttgtttttattaaaatattaaaaaaatagttaggtgttggttgggtatagtggtttatgtttgtaattttagtattttgggaggttgaggtgggtggattatttgaggttaggagtttaatattagtttggttaatatggtgaaattttatttttattaaaaatataaaattagttgggtgtagtggtgggtgtttgtaattttagttatttgggaggtttaggtaggagaattgtttgaatttgggaggtggaggttgtagtgagttgagattgtattattgtattttagtttgggtgataaaagtaaaaattttgttttaaaaaaaaaagaattagttaggggtagtggtgaatgtttgtagttttagttatttaggaggtagaggtaggagaattatttgaattttggaggtagaggttgtagtgagttgagattgttttattgtattttagtttaggtgagaagagtaaaattttatgttaaaaaaaaaaaaaaaaaaggaaagaaaaaaaataatgattagaaaggaagaaattaaatatatttatagttagtatgattttatatatattatggttttaatggggttaggtgtggtggtttatgttgtaattttagtatttttaggaggttgaggtaggtggtttttttgggattagttggttaatatggtgaaattttaattttaataaaaatataaaaaattagttaggtgtggtgagggtatttttaattttagttatttaggaggttgaggtaggagaattgtttggatttgggaggtagaggttgtagtgagttgagattgtgttattgtattttagtttgggtaataagagtgaaattttggtagggtgtggttttatgtttgtaattttagtattttgggaggttgagttaggttgattatttgaggttaggagtttgagattaatttaatatggtgaaattttgtttttattaaaaatataagaattagttgggtgtagtggtgggtgtttgtaattttagttatttgggaggttgagatagaagaattgtttgaatttaggaggtggaggttgtagtgagttgagattatgttattgtatattatgttgggtaatagagtgagattttgttttaaaaaaaaaaaaaagatgaaattttattttaaaaaaaaaaaaaagttttaatggaaaatttataaaaagttattaaaattaataaataaatatagtagggttgtaggttatagggtaatatagttatttttttatttgtaggggtttggttttgggattttttatatattaaatttatagatgtttaagttttatatataagatggaatagtatttaatttatatatatttttttatatagtttaaattatttagattatttatattatttttatataatgaaaatgttaatgtatatgtaagtatgtatgtaagtatttgtattatattgtttagggaattattggatagataggtttttaagattgatattagtagttattgttaagattttggttaggtttgtttttgtttggggttttagttgattttattgtttttttatttagttaagggtatttgtattttttttggttttttggttatttggaaggtttagtttagtttggtatatttgtattttggtttattgatgttggtatttttgggaaggttttgttttgaaaaatatggagattttagttgttattgaagatttgagagataaagatagggagatttgtttgtagatttgtgtttttttaagtgggattgagattttgggttttttattttaggatagtattttttggtttgttgattgaatagatttttgaaggaggtgtagttgtattttaggagtgggggtgggagtagtattattgatttgtattaataattatatagttttttttagaataataatatagaataagtgaaatagaataattgtagaaagagttaatttttgttgagtttttattgtgtgtttagtattttttttaattttatattttttataatatatagagtattaggtaggtggggtttgggggtttatgtttgtaattttagtattttaggaggttaaggggggtggattatttgaggttgggagtttaagattagtttgattaatatggtgaaattttgtttttattagaagtataaaattagttaggtgtggtggtatatgtttgtagttttagttatttagtaggttgaggtaggagaattatttgaatttgggaggaggttgtagtaagtggagatagtgttattgtattttagtttgggtaataagagttgagattttgttttaaaataaaataaaataaaataaaataaaataaaataaaataaaaaaagaaaagagtttgttattaaaggagttgtttggtaggggatgttttgttagtgtaaataatagaaaagtgggttgggtatagtggtttatgtttgtaattttagtattttgggaggttaaggtgggtggattatttgaagttgggagtttaagattagtttgattaatatggagaaattttgtttttattaaaaatataaaattagttgggtgtagtggttgatgtttgtaattttagttatttgggaggttgaggtaggagaattgtttgaatttgggaggtagaggttgtggtgagttgagattgtattattgtattttagtttggatgagagtaaaattttgttttaaaaaaaaaaaaaaatagaaaagtgtaataaatatttatagtaggtatgttttttagtaaatttgatgataaatttggtataaagaaagagagtatttttgaaaaaaaaaaaaagaaaaagaaagagagtattttgtttgggtaatatagtgaaattttgtttttataaaaaaatttaaaaattggttgggtgtagtggtttatatttgtaattttagtattttgggagttggaggtgggaggattatttgaggttaggagtttgaaattagtttggttaatatggtaaaattttatttttattaaaaatataaaaaattaattaggtgtattggtgggtgtttgtaattttagttatttaggaagttgaggtaagaggattgtttgatattgggaggtggaggttatagtgagttgagattatattattgtattttagtttgggtgatagggtgagattttgtttttaaaaaaaaaaagaaaaagaaaaagattaaaaaattagttaggtaggtttttgtggttttagttatttgggaggttgaggtaggagaattattgagtttaggagtggtaggttgtagtgagttatgattgtattattgtattttagtttgggttttaaagtaagattttgttttaaaagaaaaaagaaagaaagaaagaatatggtgggttaggtatagtggtttatatttgtaattttagtgttttgagaggttgaggtaggtggattataaggttaggagttttatattagtttggttaatatggtgaaattttgtttttattaaaaatataaaaaattagtaggtagggtggtaggggtttgtaattttagttatttgggaggttgaggtaggagaattgtttgaaattagaaggtagaggttgtagtgagtttagattgtattattgtattttagtttgggtgaaaagagttaaattttattttaaaaaataaataaaaaaataaaataaaaaaaaatatggtagtttttgaaagtttgtttgggagaaggtgtgatgatggttgtataattttgtgtaagatgttggtttatataggggttgttttttgtttttttttgtttttttaattttttatataataggtttgtgtgttatgtatatttattgagtttaagtaggtgtaaggtattgtgatttaatattttggttagtaagataataagatagattattgttttgtttttaggaagtgtatatgttattagaggaaatagataaaataaataaggaaaagtattagataatgtaagtgttatgagaatgtaaatgaggtgatgtgaattaaaataggatgatttaagtttgtatggaaggtttttatttttatgtttttggttagttaaggaattattagttgattagtagagaagggtagtttgtttagttagagtttttggggaagagggagtggttgttaagagatgagattaaagaagttgagatgggttttttgtgagggggggttgtaatgtagggttgaggagtgtttgaagagaatgggtaggtgagtggtgagatagttgtttttttagaagttttgtagtgaaaggaattaaagaaatggagttgtgtattaggtggggaagggtgggggttaagggggtgtttttttttatatagagattgtaggttgagaatgattatatttttgttaataggaggtgggagtagggtatggtagtttatatttgtaattttggtattttaggaggtggaggtgggttgattatttgaagtaaggagtttgagattagtttggttaatatgtaaagttttgtttttattaaaaatataaaaattagttgggtgtggtggtatttgtttgtaattttagttatttgggagattgaggtaggagaatggtttgaatttggaaggtagaggttgtagtgagttgagattatgttattgtgttttagtttaggtgatagagagagattttattttaaaaaaaaaaaaaaatataggaagggagttgggaatagggtgtatatttaggaagttttggggatttagtggtgggaaggttggaagtttttttttgattgttttttttttaaagaagtgtatggttggtgtggggtggggtaggagtgtttgggttgtggtgaaatattggaagagagaatgtgaagtagttattttttttttgttttataggaagttgagttgttttagatattggtatggtgttgggggagggggttttttttttgtaggtttaggtgatttagggttggaagtgttttatgttggatttttatttttttttttgtagt

SEQ ID NO: 348 - DNA, 15863 bp, Artificial Sequence
  chemically treated genomic DNA (Homo sapiens)
gttgtaagaggaaaagtggggatttagtatgagatatttttaattttgggttatttgggtttgtagagaaggaatttttttttttaatattatgttagtgtttgagatagtttggttttttgtggagtaggaaaagaatggttgttttatatttttttttttaatgttttattataatttaagtatttttgttttattttatattagttatgtatttttttgaggaaaagataattagagagggatttttaatttttttattattaaatttttaagattttttaaatgtgtattttatttttaattttttttttgtatttttttttttttttgagatggagtttttttttgttatttaggttggagtatagtggtatgattttagtttattgtaatttttattttttgggtttaagttatttttttgttttagttttttgagtagttgggattataggtgagtattattatatttagttaatttttgtatttttagtagagatagggttttgtatgttggttaggttggttttgaattttttattttaggtgattggtttgtttttgttttttaaagtgttaagattataggtgtgagttattgtgttttgtttttattttttgttaataaggatatagttatttttagtttgtaatttttgtatggggaaggatatttttttggtttttatttttttttatttgatatatggttttatttttttgattttttttattgtaaagtttttggaagaataattgttttattgtttatttgtttattttttttggatattttttagttttgtattataatttttttttatgaagggtttgttttggtttttttaattttattttttaataattatttttttttttttaaaagttttagttagatgggttgtttttttttgttaattaattggtggttttttggttagttaggaatatgggggtaggggttttttgtgtagatttaagttattttattttaatttatattattttatttgtatttttatagtatttatattgtttgatatttttttttgtttattttatttgttttttttaatagtatatatattttttaagggtagggtagtgatttattttgttgttttgttgattaaagtattagattataatgttttgtatttgtttgggtttaataaatgtgtataatatataagtttgttatatgagaggttaagagagtgagaaagagtaaggggtagtttttgtgtggattagtattttgtatgaagttatgtaattattattgtatttttttttagataagtttttaaaggttgttatgtttttttttgttttgtttttttgtttgttttttgagatggagtttggttttttttgtttaggttggagtgtagtggtgtagtttaggtttattgtaatttttgttttttggttttaagtaatttttttgttttagttttttgagtagttgggattataggtttttattattttgtttgttgattttttgtatttttagtagagatagggttttattatgttggttaggttggtgtggaatttttgattttgtgatttatttgttttggttttttaaagtgttgggattataggtgtgagttattgtgtttggtttgttatgttttttttttttttttttttttttttgaggtagggttttgttttgaagtttaagttagggtatagtggtgtaattatggtttattatagtttgttatttttgggtttagtgatttttttgttttagttttttaagtagttgggattatagaggtttgtttggttaattttttagtttttttttttttttttttttttttggagatggagttttgttttgttatttaggttagagtgtagtggtgtgattttgatttattgtaatttttattttttagtattaagtgatttttttgttttaattttttgagtagttgggattataggtgtttattaatgtgtttgattaattttttgtatttttagtagagatggggttttgttatgttggttaggttggttttgaatttttgattttaggtgatttttttgtttttgatttttaaagtgttgggattataggtgtgagttattgtatttggttaatttttgagtttttttgtagaggtagggttttattatgttgtttaggtaggatgtttttttttttttttttttttttttttttagggatgttttttttttttatgttaaatttgttattagatttgttaagaaatatgtttattgtaagtgtttgttatatttttttgtttttttttttttttgagatagagttttgtttttgtttaggttggagtgtaatggtgtgattttggtttattgtaatttttgttttttaggtttaagtgatttttttgttttagttttttgagtagttgggattataggtattggttattgtgtttggttaattttgtatttttagtagagatggggtttttttatattggttaggttggttttgaatttttaattttaggtgatttgtttgttttggttttttaaagtgttgggattataggtatgaattattgtgtttagtttatttttttgttgtttgtattgataaaatattttttattaaatagtttttttaatggtaggtttttttttttttttattttattttattttattttattttattttattttattttgagatggagttttagtttttattgtttaggttggagtatagtggtattatttttgtttattgtaatttttttttggatttaaatgatttttttgttttagtttgttgagtagttaggattataagtatgtgttattatatttggttaattttgtatttttagtagagatggggttttattatgttagttaggttggttttgaatttttgattttaggtgatttattttttttggttttttaaagtgttgggattataggtgtgagtttttaagttttgtttatttagtattttatgtattatgggaaatgtagagttgaggaaagtgttgggtatatagtaagagtttaataaaggttagttttttttgtaattgttttattttatttgttttatattattattttagagagaattgtgtgattgttagtgtggattagtggtattgtttttatttttatttttaaaatgtaattatattttttttagggatttatttagttaataggttaggaggtgttgttttgaaatggggggtttaaagttttaattttatttggagggatataggtttatagataggtttttttgtttttattttttaaatttttagtagtaattaaaatttttgtgttttttagagtaggatttttttaggggtattagtattagtgggttaggatataaatgtgttaggttgaattaggttttttaaatggttagggagttaagagaaatgtaggtgtttttggttgggtgggaaggtaatgagattaattgagattttaaataggggtaggtttgattagaattttaatagtggttgttggtattagttttgaaggtttatttgtttagtgattttttaaataatatagtataagtatttatatatatatttgtatgtatattagtatttttattgtatgggggtaatgtaagtaatttagataatttaaattatatgggaggatatgtgtaggttaaatattattttgttttatatatgggatttagatatttgtgggtttggtgtgtgaggagttttagaattaagtttttatagatagagggataattatattgttttgtaatttgtaattttgttatatttatttattagttttggtagttttttatggattttttattaggatttttttttttttttgagatagagttttattttttttttttttttgagatggaattttgttttgttgtttggtgtggtgtgtaatggtatgattttagtttattgtaatttttattttttgggtttaagtaatttttttgttttagttttttaagtagttgggattataggtgtttattattatatttagttaatttttgtatttttagtagagatggggttttattatgttaggttggttttaaatttttgattttaggtgattggtttggtttagttttttgaagtgttgggattataggtgtaagattatattttgttggagttttatttttgttgtttaggttggagtgtaatagtgtgattttggtttattgtaatttttgttttttaggtttaagtaatttttttgttttagttttttgagtagttgggattagaggtgtttttattatgtttggttgattttttgtatttttattagagttggggttttattatgttggttagttggttttagggaagttatttgttttagttttttaaaagtgttaggattatagtatgagttattatgtttggttttattaggattatggtatgtatagaattatattggttgtgaatgtgtttgatttttttttttttaattgttattttttttttttttttttttttttttttttttgatatggaattttgttttttttgtttaggttggagtgtaatgggataattttggtttattgtaatttttgtttttggggtttaagtgatttttttgtttttgttttttgagtagttgggattataggtgtttattattatttttggttaatttttttttttttgagatggagtttttgtttttgttatttaggttggagtgtaatggtgtaattttggtttattataatttttgttttttaggtttaagtgatttttttgtttaagttttttaagtagttgggattataggtgtttgttattatgtttggttaattttgtatttttagtagagatggggttttattatgttggttaggttggtgttgaatttttgattttaggtgatttatttattttggttttttaaagtgttggggttataggtatgagttattgtatttggttaatgtttggttatttttttaatattttaatagagatgaggttttattatttttgttaggttggtttttaattttagattttaggtgatttgtttattttggttttttaaagtgttgggattattggtgtgagatattgggttattaattattatttttttttttttttttttttttgagatatagttttgttttgttgtttaggttggagtgtagtggtttgattttagtttattgtaagttttgttttttgagtttatgttatttttttgttttagttttttgagtagttgggattataggtgtttgttattatgtttggttaattttttgtatatttagtagagatagggttttattgtgttagttaggatggtttgattttttgattttgtgatttatttgttttggttttttaaagtgttgggattataggtttgagttattgtatttggtttttattattttttttttttgtttggttaaaatttttagtatggtattaatgttgtgagagttaaatttttttttagtttttgattttagaggaaaaagtgttgagttttttttttttttttttttttttttttttttgagatgaagttttattttgttatttaggttggagtgtagtggtatgatttaggttttgtaagttttgttttttgggtttatgttatttttttgttttagttttttgagtagttggtattataggtgtttgttattatgtttggttaattttttgtttttgtatttttagtagagatggggttttagtatgttagttaggatagttttgattttttgattttgtgatttgtttgtttaggttttttaaagtgttggtattataggtgtgagttattgtttttagtagtattgagttttttattattatgtatgttgttagtggaattttgattgtggatgttttgttattaaattagttaagttttttttttttagtttgttaggaggttggttggtttgtaattatgtatatgtgttgatattattaattgtttttgttatatttgttgaaatgattatagggtttttatgtttttttttgttaatgtggtgaattatatagattgatttttttttttttagtaaagattagtttgattatgttgtttaggttggttttgaaattttgggtttaagagatttttttgttttagttttttaaaatgttgggattataggtttgagttattgtattaggttaatttttgaatgttgaattagttataattatgagataaatattatttggttagaatgtatttattttttttttttttttttttttgagatggagttttattttgttgtttaggttggagtgtaatggtgtgattttagtttagtgtaatttttgttttttgggtttaagtgatttttttgttttagatttttgagtagttgggattttaggtgtttattattatgtttagttaattttttttttttttgagatgaagttttgttttgttgtttaggttggagtgtagtggtatgattttggtttattgtaatttttgttttttgggtttaagtaattttgttttagttttttgagtagttgggattataggtaggtgttattatattggttgatttttgtatttttagtagagatggtgttttattatattggttaggttggttttgaatttttgattttgtgatttgtttattttggttttttaaagtgttgggattataggtgtgagttattgtgtttagtttgatttttgtatttttattagaaatggggttttattatgttggttaggttggttttaaatttttgattttaagtgatttgtttgttttagttttttaaagtgttgggattataggtgtgagttattgtgattggtttatttatttttttttttatattattaggtttggtttgttaaaattggttagttgttgtatgtttatgttaataggaatattggtttatattttttttttttataatgtttttgtttggttttggtattaggattattttggttttgaaaataagttgggaaatatttttttattttttttttttttttttttttttttgagatagggttttattttgttgtttaggttggagtgtagtggtgtaattttggtttattgtaatttttgttttttaggtttaagggatttttgtgttttagttttttgagtaattggtattataggtatggtgtatgtttagttatttttgtattttagtagagatggggttttgttgtgttggttaggttggttttgaatttttgattttaaatgattttttgttttagtgtattaaagtgttgagattataggtatgagttattgtgtttagtttgtttttttgttttttgaagagtttgtgtaagatgggtattgtttttttttttaatgtttaaagagagtagagaatagaggagataaatagaaaatagtattaagaggttaggtatggtggtttatatttgtaattttagtattttgggaggttgagatgggatgaaagtttgaggttagtagtttgagattagtttgggtaatatagtgagattttgttaatataaaaaaataaaatagttagttgggtgtggtggagtaattttagttatttgtgaggttgttagaggattgtttgagtttaggggtttgaggttgtagtaagttttgattgtgttattgtattttagtttgggtaatagtgtgagtttttgttttaaaaattaataaagaaaaaaagaaaatagtattaaaatggtagttttatattttaattgtaaaataattaaaattaaaagtatttagtagagaaaggaagtttattttaataagtggagatagaataattggatttttatataggaaagatattagagattgatttttatattttatattataaataattaattttaagaattaattaatggtttaaggattttattgtaaaatttattattataaaggttttaaaagaaaatgtaagattatatttttatgattttggggttaaaaaaaaaaaaaaagatgttttaaataggataaggtaaatattgaatataaaaaagattaatttattttttttaagattttgtaaattttgtaaagtaaataaataggtttgtaatagattagaagaaaatatttatgatttatggatttgataaggatttgtatttagaaagtataaagtagttttataattgaataataaaaataaataaaaaaattaaaataataggtaaaagatttgaagagttattttataaataaaatatgaatggttaataggtatatgaaaaaatgttgaatatttttagttaatagagaattgtaaattataattataaggatatattatattagaaagattgatatatttaatgtttggaaggttgtggtataattataataatttttatattttgttagttggagtgtaaaatggtataattgttttggaaaatttagagtttttgaaaaagtttaaaatatagttattttttattttttttataattttttttttaagtatttttttaagaaatatgaaaatatatgattataaaaagaattgtataagaatgtttatagtagttttattttataattgtaaatgggaaataatttaaaaggttattaaaaggatggatatataattgatggattatattaaatgaaaaggagtaaaatattgatatatataatatgaatgaatgttagatagtatattgaaggatagaagtttgataaaaatgagtatataatgtatgattttttttttttttttgagatggagttttgtttttgttgtttaggttggagtgtagtggtatgattttggtttattgtaatttttgttttttgggtttaagtgatttttttgttttatttttttgaatagttgggattataggtatttattatgtttagttaatttttgtattttttagtagagatggggatttattatgttggttatgttggtttggaatttttatttttaagtaatttgtttgttttggttttttaaagtgtaggtgtgagttaaagtgtaggtgtgagttatagtgtttattttgattttattttatatgaagttttttaataggtaaaatggttatggagattaaaataaaggtggggttgggaattgattgggaagagatgtgatgaaatgtttttgggatgatgaaaagggtttgtgatttggtaggtattatggagtggttaggggttaaaatttatttttttgtgtatttgttgtgtgtattggtgttgtgtgtaaatgttattttgatttaggaaaaagatgatgtaagtatggtataaagtggttggtatgtggtaggtgtatgggaagaaattgtggaatgaaataattgtgagttaagagatggggtagtgggagaaatgaatttgagttttgttttttattaggaagaattggtttgggttgagggttgtatggaggattatatggatgtttgtgggtttgttttttttgttttatgatgtttagtttgtgtttggaattggaatggtttagtttaaagttagataataggtagattgttttttttgataaattattaaatgatttattattgtatttttttaaaattttatttttagatgtattatttttttttttttttttttgggaagatgagatatgtttatttttgaaagtgtttttgggtttgttttttgtatatttttttttttttttgtttatgttatggtagtgtttgtttaggttgtaggtgatttggggggtggggtatattatttaaagaaggggagggattgaggtttgtattaaaataaatatttttgtttttgtaaaggttataattaagtaatttagaaaaagaaatgtaggtggagaatagtagtttttttttgttaagtaagaggaattggtttaaaggatatttttttttttttttttttttttttattgggtgaatagtgagttgttttggtaaaaagaaattggaaatgttgttgtaagaggtagaaatgtaaatgtggagttaaataataatagggttgttgggttttttagattgtgatggttttttttggtttggtgggtaaatttttggtttagtattttttatttttatgattgatagtttttaattggattttttttatttagtggagttgggggttgtttggaaagattgttttaggaaggataaaggtttggaagttgtgggattttagtagtttgggttttttggattatttttaaatgattattttggaatggagttttagtttttattaggatgttatgggttttaaaatatatagttatgagtttttaatgttttgagatttaaaagttttagattttaatgttttgtgtattttttattttagggattttttatgtttagtattgggtggatgtgtaaagaagtatgttttaggttggtttaaggttttttaaagttttatttttttgtttaggtgtttaattttgagtttggatggttttaatatttttattatttatatttaggttttttaataatgtaatttttatgatgatttttttagttaagtttttattttatttatttttaaatttgttaagtttttattgttttatttttagttttagtgatttttttgagttgaaaatatatggagttgagagtttgtgatttagagaggatttattaagtttagttaggagtttatttaatttagggaagtgtgttattgttgtggaaagtatgtttttagtttgaatgtaaagtgtttttggagtttagtagttatttgttttttggatggtggttttagatttttgagaagtttaaaatttttagtgttagttttgagtatatgggaggggaaaattttaattttattaatttttgtgaggtttttggtataaagttggatagttgttatgataagtaagggtaagtaatttgtttgttggaggaagtaaaggaaatggagttggggaggagggtgtagagttaggatttttgttgatttggtgttgtagatattaatattttggggtggaaaattttgtaagttagagttgtgagggtagaattggtggaaattattttggaggaattttgtattgtgttaaatatgaagggtggaaggaagaaagtttttgtgtttgtttttagttggattttttttttttattagttaaaatgttattttttaggaaggttttttgtaatattatattttaatgtttttttttagatattttatattatattattttatttaattttttttataatttttattattttgataagatttatttgtttattgtttttagtatatggaaatgtaagttttatgaggatatagaatttttttattattttatttattgttgtatttttgagtgtttatattagtgttgggtagtaagtaagagtttgataataaatattttttgaatgagggagataggtttgaagtttggagaatgagatgtagaagaggtgtaagatttgttgtgttttttgtaggtggtgggggggtggtgtaggtgttttaagaattattgtgggatttggtagggggagtgtaggtgttttttgttaagatagaagtgtttagattataatttttagtagttatgaggagttttagggtttgatgggaatgggaaattttttaattttttatgttttggttttgtgggttttgtgggttgtttgtgaaatttgatttgggatgtggtggtttaattggaaggtggattgaaattttgtgatagtaagaggtttgtagtgatttgtggtgttaaggaatatagtgtttttaaaagaattggtgtttgttgtttgtttttttttttgggagttttttgtttatttttagaagaggagggaagtataggtgggtttttttagttttgtgttggatttttgagaattttgaagttattttggttgaggttaatttttgttgtgttttttttgtagtatgaagattttggagatttaattgttagttttggattgttgttttttagattaggatttagttttagtttatttttttttttatgtttttttgatgaataaaaatgtggattttgaattgatgttattgttttttgaaaggggggatttgttttggttgtttttagattttgtggttggtttagttgtgttttaggagttatgggagggggatttagtttttttttttatttttttggaaatagagtttggtttttttagtgagttgagtttttgaattgaggagtaagaattttttgaaaatataagtttttttgtagaagaagtaaatgggagtttttttgaagaagaagtgaatgggttagagttggggtttggaaaagttatggaagatatttttggggaatttgttgtagaggatgagggagatatgtaagtggtgatggtagtggagtgtggagtttggggagatgaagtgtgaggttgatttgttttttggttttgagatttatttttttaggtttttgttttttttgtttggtgatttaggtttattgttttttattttttttttagtgtttggaattatagttttttttagttgttttgattttttagtggtttttggttagagtttagtatttaatttgagaattttttgaaaggttgtaagtggtaaggataataatggggtagggagttgattatttttgagatttttattgtaaaatagtttagttttttaggagagggatgttttagagttgggagaagtggtatgtagtttttttagattgagtttatattttatttagtagtttgtgttttttattttttttaaggatttaggggggtttatttattttagaggtaggtttagttttagttttatatttgaaaagtataggtttggttagttttttaatttttttttgtttttagggtttttgatggtttttgtattttgattaatagtgttgataatattttgtgaatttataatttgtttttagagttgtattatgagggggagtaggtggaatatgtagaaatggtaaggattggggttaattgtttttttattaatgttgtatatttaagttttttgtggagatggaaaaagtgtagtttaagtgttttttgtttataaatgggattgttttttaagatgagtttttatatgtagtgttttttgttttgaattttgaagttatttagagagaggttttttttttttttaattaggaatttgtgttttttgttaaaaagtagtgaattttttgtggtagtatatatatatttttattttttatttttttgagataaggttttgttttgttatttaggttggagtgttgtggtgtgattttggtttattgtaatttttgttttttgggtttaagtgatttttttgttttagttttataagtagttggtattataggtgtatgttattatatttgattaatttttatagttttagtagagatggggttttgttatgttgggtaggttgatattaaatttttgattttagaggatttgtttattttggttttttaaagtgtggggattataggtgtgagttattgtgtttggtttatagttatttattgattgattattgatatatgttagttattgtgttgggataaagtggtggataagatagatgaagggttggtttgttttttgtgtgggagatagataataaatatgtaaattagtaagtattaggattaagatgatgataaatgttttgaaggaaatatatagaatgaagagagattaattagaggaaagtatattgtataaaatggttaggaaggagttttttgaaaaggaggtatttgagttaagatttgaaggaggataagggattagttatgtgaaggtttttggaaagagttttttaggaattggtaatgatattataaatatttagaattgggaaatagttttgtgtgttaaaagattagaaaggttttgtatggtggtttatgtttgtaattttagttatttaggaggttgaggtgtgtagattatttgaggttaggagtttgagattagtttggttaatatggtaaaattttattgttattaaaaatattaaaattagatgtatgtggtggtatgtgtttgtaattttagttatttgtgtggttgaggtaggagaattttttaaatttaggaggtggaggttgtagttagataaaattgtattattgtattttagtttgggtgatagagtgagattttattttaaaaaataataaaatagattgggtttagtggtttatatttgtaattttagtattttgggaggttgaggtgggtagattatttgaggttaagagtttgagattagtttggttaatatggtaaaattttatttttataaaaatataaaaattagttgggtgtgatggtgggtgtttgtaattttagttatttgagaggttgaagtagaagaattatttgaatttaggagatggaggttgtagtgagttaagattatgttattgtattttagtttgggtgatagagtgagattttattttaaaataaataaataaataaataaataaataaataaatataaaataaaaaatttagaatgttggtatagttagattgaggtaagtgagggggatagaggggtgaggatagagaagagtagttatgttgtgttggtttttatgggtaaggtatttggagtttatttgggaagttatgagagaggtgttttttttttttttttgagatagagttttgttttgttatttagttggagtgtagtggtgttattttagtttattgtaagttttgttttttgggattatgttatttttttgttttagttttttttgagtagttgggattataggtgtttgttattatgtttggttaattttttgtatttttagtagagatggggttttattatggttttgattttttgattttgtgatttttttgttttggttttttaaagtgttgggattataagtatgagttttgtgtttagttttttttgggttattttttaaatttgttttattgtattttttagtagtatgagttattgtttttatttttttgtgttggagtatttaggtatttagggttttgttgggttttttttttttttattagtatttttttttttttgtattgttttttgagatggtgataatgattgttaaatttttaatttttgagagtggtttattgaggttgtgattatgatattaatgattatagtattaggatattttaaaagatatattttgtaatatagatagttaatttgtgttttttttggttttttttggggggggggggttttgagatagagttttgttttgtggtttaggttggagagtagtggtgtgattttgttttattgtaatttttgtgttttggtttaagtgattttgttgttttagttttttgagtagttgggattataggtatgtattattgtatttggttaattggggtatttggagtagagatggggttttgttaagttggttaggttggttttaaatttttgattttaagtgatttatttatttgtgttttttaaagtgttgggattataggtgtgagtattgtttttggttagtgagtttgtgtttaaaagatttttgtggttggtgtggtggtttatgtttataattttagtattttgggagattaaggtgggaggatgtttgagtttaggagtttgagattagttttggtaatatagttagattttgtttttattaaaaaagttgggtttatggttttagttatttgggaggttgaggtgggaggattgtttgagtttgtgaggttgaggtt

SEQ ID NO: 349 - DNA, 6077 bp, Artificial Sequence
  chemically treated genomic DNA (Homo sapiens)
aaaatatgagaaagtaagtatttgatattttttattttaaaagaggggggtttttggaatgttattgttttggtttttagtgattgtggtttttttttttgttagaggttttatgtttagattattagtgatatttttagtttttaaagattagtttagtttatataagggtaatgttgaaatatataagttaggttttaatattgttatattttattgtaaagtataaaagtatgttttaatttgttatttaaagttttaagatatttttaagtttttttttatttgtatgttaaaaattaaatttaaatgggaagtagtattgggagaaagtttttttgtgaattaataattaaaattttttgttagttttataaatatttttggataatttttttaaatttataaagggtaagaattgaggttttatagatgataatgaaaatggtaaggaatgtattaatttttttatgtagtgttgaatttagagttaaaataatagaagattaaaagataggtttttatttttgtatatataaagatgttttgtaaatgtttatttatttttattaatttatttttaatatgaaatgggaaatgtttaagtgttagtattatttttttaaagatagtttttttttgtttatatttgtttattatgtttttatttaagtaaataattttaagtaaaaataatgtttgagtatttatttgttgaatgtatattttattatagttttaagattaagaattgatgtttaaatattaattgttttgttagttttatttattaaggttaaagtagtttgtgttttatgaattgatattaaaaaagaaagttatgttagttttttgtgggagaaaagagagataggtgggtgatggtagattggaataaggagttattatagtatttatttttttatattgtagttttgaaaattgtgattagttatagtgaattttttatgaaatggaatatttttattaatattttgaggaattatataaattttattgtaagatatgaaaattagaaatatggatttgttttttttagtttttagggtttttaagaagatgattttagtaatagattattattaagtgttttagggtattttgattagagtgtataagttggaaaaaaatatttaagttaagtaagtagatgtaatttttttttttataatttattgaaatttttataaatggtaaaaataaaaaataaattttttatttaattgaggaggggggtatattgaaaatatattaaggttgagatgttatttaaattaatgaggttttttgttttgtagttgatgttattttatgtgatttggaataaaatttttttgaagaggtaaaaaatgtaatttgagagttaaatttttaaaagttagatagagtataggaatgttaggagtggtaaaatttgaaaaagtattatgatatattagttagttagtataggtggtggataaggaaaatgaagtttattttttatgaggtatgtttttttttagtggttttttaatgttaattgttttttttttttgaggatatatatattaggtatttgggttattttttttttttgaggatatatattattaggtatttaggtatatatattatatgttttgaagtttaaagttatagttttgtgatttaagtatttttttgttatttatggaatgaagattttaaattttagttatgaggataattatttttttatttggggatagaatattagtatttaaattatttatttggtatgtggtagaggagaagagaattagaggagaagtagagatgataaagtagttatattatttattagtttataggtaatagaattattaatttgttttttgtgataaagtaataataaagagttgatattttttatatttttatttgtgtgtagttggtattgttgatatttatttttttaagggtatttttttagattttttatttgtttatggtatttttttgggttttgtatttgtttgggtatttgttggggttttgtatttgtttggtttttatatttgtttggggtatttgtttgggttttgtatttgtttggggtatttgtttgggttttgtatttgtttggggtatttttttgggttttttatttgtttagggtatttttttgggttttgtatttgtttggggtatttgtttagatattgtatttgttttgggtatttgtttgggttttgtatttgtttgggtattgtatttgtaggatttttaagttgtttttatttatgtggttgtttttggttttgtttgttggggatgttggtattgaggatgttttgtttgtggtttaggtttttgttgtttattaggtatttgttgtttggggagaatttgtagagtaagttggagagtttgaatattttggagaagtttatggttgttgtttgttgtgggtgttattttgtgtttgaaaatttgtgggatttttgggtgtgtagtaggttgtaatagttgatgttggtttttgaggttggaagttagaaggtggaagtgaattgtagtttattagtgttgttggtttttgtgtggtattgtggggtttgtagtttttgtgttgtagggttttaaaggaaatgtttatgttttttttgattagggatttttgatttgagaattttattttaaaggttgggaggtttttgagtatttttagttagggttgttgataaaaatgtagaaagtatagtaaaatttgaattttagatttataataaatttagttataagtatgtttttaaatattgtatgggatatgttaatatggaaaaattatttgttagtttgaaatttaaatttaattgagtgatttgtgtgtttgtgtgtgtgtatatatgtatatatatatatttatatttatatgtaaatgtatgtttatatgtaaatatatgtttatttataaatatatttttaataagtaatatggtgtttgttgtatatatattatattgtgtatgtaatgtataagtatttattttgtttgtttggggttttgtttgtttttgttgagtttgatttttttatttgttgtttggtttttgttttatgttttagtgttattgagattaaggagagaatgaatttgttgttgattgggtagagtgagtgtgtggattgtggttattgtttgtttattatttgtgtgtatttgggttggtattgggtgaagaattgtgtgggtttgggatttgggggtttagagggagtgagtttttgtgtgggtgtttggtttgtaggttttgtaggtttaggggtgtgttttgtttttatttttattttggattttggtttttttttttagatagtggttttttttatttttggtttttgtaggttgttagtagtttgtgttaggttttgttggtgtttttagggttttttagattgtgtagattttgatatttttgtttggttttgggttttgggagttgagagttggttagggttttgtttgtatttttgggtgtttagttttgggtttgttttttgtggatgttttaatttttttggttgaatggatggtggtgtgtgtgtgttttattttggtggtgttggttttttttgttgttaaaattagatttaaatttttgtatgggatttgtttttgggtttttattttgtgtgtttagtaaatagtgggtgagttatgaagatgtgtgagttagttggattttttttgttaggtgtggatttgttgtggttagagaatttagtttgtgttagtttggtttgtttgtgaagttatgggttttattgatgtgattttttaagatgtgggggttattatgggtagaggatattggtttggagttagattatgggttttataagtattagattataagtagtgttgttattgagagttgtttggaatttgtttagtatgttgggttttttagttagggtttggtgtatgtggttgagggttttggaagttttgatggtttaggaggagtaggtgggtggggtggtgggtgttgttggttggtagagagttttggtttgatttagtgtaggtttggtgtgtgtagagaataattttaagtgtattgatgtttgtgagttttttttaaatattgaatgggatttagagtttgagtttataggtggtggttgggggagggagtagggtgttggttgttgtttgggagtgtttgtgttttgggtgatttttggaaggatgtggggtttaaattttggttggggttgggagagtagtttttagaggttttttgtgggattttttgttgggtgggattgtggttttataggagaagtgggtggtaagttttgtttggtggaaagtagttgtttttttttttttgggtttggggtggtgttttttatttttgttttttgttttttatttttgttttttgttggttatattttttgttttttggattttaagtgttttgtgtgttgaggagtttagtgttagtggtggtggttaggagagatttgggtgttaggaaagatgggttgtttgggggatagtagggagtttgggggaaatgtaggtgttgggtatagagttggtattggtgtttttagttttgttgaagattgtggttgggtttggtttgtgggaggggttttggtgttggatttgttttggttttgtgtgggtggttttgttgggttttgtaggagtgatgtgtgttaaaaggtggtgggaaggaggtggggtagagtgtgtttgggattttgatttggatgtggttagttggagaggtggagtgttgggaggagattttggttttgttgtgatttggtggtttgtgttgtttttttgtgtgttgggttaaaaaggtgttaatgtttgtggttgtttattttttgtggtgttttttttttttgtgtttatataatttgtttaggggttgggtagtttgttttgtttttttgtttgtgtatttgtttggaggtttgtgtgtttgtgaaggggatgtagtgaaattggggtttgtgttaggttagttgggatggatgttgatgtttggggttgtgatggttgtaggtaggaggtttagggttggggggtggtttggttttgtgggtgggggttggagtgtagtgttgggtaggtatttgggtttgtagttttgaagttgggaggtgaggggagagtgattggggatgagttgggataaggtgatataggggtttttttggagttggattggtttttgggatttggtgtttgtgagaggttggagtggttagagtttagtttgtgaggagatgtgggttttgtttttagtgttggttgtttttggtgttaaagatagttttgtaggggttttgggagggttttttttttgttgttttttttttattttgggttttgagggttgttgggagggtaattttgggaagaggttggggtgtggggtgtgggtgtaggtggaaattgttagtaagtttttttttgtttgtgtgttttttttgatttgtagggttgtgttaattttgaggttttagtttttttgaggagttagggttaggtttttttttggatagggagaaggatttgggtgggggttttgatttatggagttggttattaagtggttttgatggttttttgagggatagttttttgtggttttgagtttgtttgttgagggtttttggtttgtttttggagtggttttaggtagagaaagtttgtgaagaaatggtttgggttggtttggagggagatattttatgtttttttagtttttgggttgtttttttttgtagtttttgttttttttggggtttggatttggggagtgatgattatttttgtttagtttgtattttggtttggatgttaggagataagtttatgtagtatgtatatgtttgttatataaataggggatagatagatgatttttaattagtaagggtgtagggaaaagtaatgtattttaaatttttgattagaggttatttgtttttaaagatgttgttatttgtttatttattgtttggatatttggaaatggtttaggtttattaatataatg

SEQ ID NO: 350 - DNA, 6077 bp, Artificial Sequence
  chemically treated genomic DNA (Homo sapiens)
tattgtgttaatgagtttgagttatttttaaatgtttagatagtgaataaatagatggtagtatttttggaagtaaatgatttttggttagaagtttggggtgtattgtttttttttgtatttttgttggttgaagattgtttatttgttttttgtttatgtagtagatgtgtgtatattatatgggtttattttttagtgtttaggttaaaatataagttgagtaaaggtaattattgttttttaagtttaagttttgggaaaggtaggggttgtaggaggaggtggtttaggagttaagggggtgtgaggtgtttttttttaggttggtttgggttatttttttatgggttttttttatttgggattgttttggagataggttaggagtttttgatagataaatttagagttatagggagttgttttttgggaaattattgaaattgtttagtaattaattttatgggttaaggtttttgtttagatttttttttttgtttagaggggggtttggttttggttttttagggaagttgaggttttgggattggtatagttttgtaggttggagggagtgtgtgggtggggaggagtttgttggtgatttttatttgtatttgtgttttgtattttggtttttttttggggttatttttttaatggtttttggagtttggggtggagaggggatagtaggaggagggtttttttggaatttttgtggggttgtttttggtgttaaaggtggttggtgttgagggtaggatttgtgtttttttgtaggttagattttggttgttttagttttttgtgagtgttaagttttaggggttgatttaattttgagggagtttttgtgttgttttgttttagtttgtttttgattgttttttttttattttttagttttggagttgtgagtttaggtgtttgtttagtgttgtgttttagtttttgtttgtggagttgaattgttttttggttttgggttttttatttgtagttgttgtagttttgggtattggtgtttgttttggttggtttggtgtgggttttggttttgttgtgttttttttgtgggtgtgtgagtttttgggtgggtgtgtgggtggggaggtagggtgggttgtttggtttttaggtgggttatatgggtgtggggaggggaggtgttgtggggagtaggtggttgtgggtgttagtgtttttttagtttggtgtgtgggaaggtagtgtgggttattgagttgtggtggggttaaggtttttttttggtgttttgtttttttagttggttgtgtttaagttggggttttgggtgtgttttgttttgttttttttttgttgttttttggtgtgtgttgtttttgtagagtttggtgaggttgtttatgtagggttgaagtaggtttggtgttagggttttttttgtgggttagatttgattgtgatttttggtagagttggggatgttggtgttgattttgtgtttgatgtttgtgttttttttggattttttgttgttttttagatggtttattttttttgatatttgggttttttttggttgttgttattagtgttgggttttttggtgtgtggggtgtttggaatttaaggggtaggggatgtggttggtggggaataggggtgaggggtggggaataggggtgaggggtgttgttttaggtttaggaggaggggaatggttgttttttgttaagtagggtttgttatttattttttttgtggagttatggttttgtttggtagaggattttgtggagagtttttgggggttgtttttttaattttagttggagtttgggttttatgtttttttaggggttatttaggatgtgaatatttttgggtggtggttagtattttgtttttttttttggttgttgtttgtgggtttgggttttggattttgtttggtgtttggaaggagtttgtgggtgttggtgtgtttggagttgttttttgtgtgtattagatttgtgttaggttaggttgaagttttttattggttagtgatatttgttgttttgtttgtttgttttttttaggttattggggtttttagggtttttgattatgtatattaggttttggttaggggatttgatatgttgggtgagttttgagtggtttttagtggtggtgttgtttatggtttgatgtttatggggtttgtgatttggttttgaattgatgttttttgtttatggtgatttttatgttttggaaagttgtgttagtgaagtttgtggttttgtgagtgagttgggttggtgtagattgggttttttggttgtagtgggtttgtgtttgatggggagggtttggttgatttgtatatttttatggtttatttattgtttgttgggtgtatggggtggggatttaaagatgaattttatgtagaggtttgggtttagttttggtaatagaaaaggttggtattgttggagtaggatgtgtgtgtattattatttatttggttggggaggttggggtgtttgtggggagtagatttgaggttgggtgtttggaggtatgagtaggattttggttggtttttagtttttagaatttagggttaggtggggatgttagggtttgtgtgatttggggggttttagaggtgttggtggggtttggtgtggattattagtggtttgtgggagttaggggtggagggggttgttgtttagggaagaggattggggtttggagtgggggtgagaatgaggtatgtttttgagtttgtgaaatttgtggattgagtgtttgtgtaggagtttgttttttttgggtttttaggttttagatttgtatgattttttgtttggtgttagtttagatgtgtgtgggtgatgaatgggtggtggttgtgatttatgtgtttgttttgtttagttagtggtaaatttgttttttttttgattttagtggtattggagtgtgaggtaagggttaggtggtaggtagaggggttggatttagtaaaagtaaataaaattttaagtaaatgaaataaatatttatatattatatatatgatataatatatgtgtgatagatattgtattatttattaaagatatatttgtaggtaaatatatatttatatgtaaatatatatttatatataaatataaatatatatatatgtatgtgtatatatatgtagatatataggttgtttaattaaatttgaattttagattagtgagtaatttttttgtattagtatgttttgtgtaatatttgggaatatatttataattagatttgttgtgaatttgaaatttaaattttattgtgttttttatatttttattagtagttttagttggaggtgtttaaaggttttttggtttttgaggtaaggtttttgggttggaaatttttggttggaagaaatgtgggtgttttttttaaagttttgtggtataagaattataagttttataatgttgtgtggaagttggtggtgttgataggttgtagtttatttttgttttttgatttttggttttggaggttggtgttggttgttgtagtttgttgtgtgtttaggggttttgtgggtttttgggtgtagggtggtgtttgtggtaggtggtggttatgaatttttttgaggtatttaagttttttagtttattttgtaagttttttttggatggtaagtatttggtgagtggtggggatttgggttatgggtaggatatttttggtgttagtgtttttggtgggtagggttgggggtggttgtgtgggtggaggtagtttggggattttgtaggtgtggtgtttggataggtgtggggtttgggtaggtatttggggtaggtgtagtgtttgagtaagtgttttagataggtgtgggatttaggaagatattttagataggtggagggtttggggaggtgttttaagtaggtgtggggtttaggtaggtattttaagtaggtgtggggtttaggtaggtattttaagtagatatgggggttggataggtgtaggattttggtaggtgtttgggtaggtgtgggatttaggaagatattgtagataggtggggggtttggggaggtgtttttggaaaggtgggtattggtagtgttgattgtatataggtgagggtataggagatgttggttttttgttgttattttgttataaaaggtaaattgatgattttgttgtttgtaaattggtaagtggtgtggttattttgttatttttattttttttttaattttttttttttttattatatgttgaataaatgatttaaatattagtattttatttttaggtaaggaagtagttgtttttatggttgggatttgaggtttttgttttatgggtggtagaagggtgtttaaattatagagttataattttaagttttaaaatatatagtgtatgtatttggatgtttagtagtgtatatttttagaagagagggataatttggatgtttagtatgtatgtttttagaagagggggataattggtattggaaagttattaagaagaaatatgttttgtaaaaagtgggttttgttttttttatttattatttgtattaattgattgatgtattatgatgtttttttaggttttgttatttttgatatttttgtgttttgtttagtttttgagagtttaatttttaaattatgttttttatttttttagggaggttttattttaaattatataaaatagtattagttataaaatagaaaattttattagtttaaatggtattttagttttggtatatttttaatgtgtttttttttttaattaaatgagaggtttgttttttgtttttattatttatgaaaattttagtgaattataaggagaaagattatatttgtttgtttaatttgggtgtttttttttagtttgtatattttggttaaaatattttgaaatatttggtaatgatttgttattggaattatttttttgaaagttttgaggattggggagagtaggtttatgtttttagtttttatattttgtagtagagtttatgtggttttttaaggtgttggtaaaaatattttattttataaggaatttattgtaattgattatagtttttaaagttatagtgtgagaaagtaagtgttgtggtagttttttgttttaatttgttgttatttgtttgtttttttttttttttatggaaaattaatgtggtttttttttttgatattggtttataaaatataaattattttgattttgataagtaaaattaatgaagtagttaatatttaaatattagtttttgattttgaaattgtagtaaaatatatatttagtaggtgagtatttaggtgttatttttatttgaaattgtttgtttggatagggatataatgaataaatatggataagaagaaattatttttaagaaaatagtattaatatttaaatattttttgttttgtgttaggaataggttaatggagataaatgagtatttgtgaagtatttttatgtgtgtagaagtgaaagtttgttttttgattttttgttgttttggttttgagtttggtattgtataagaagattgatgtattttttgttatttttgttgttatttgtgaagttttaatttttattttttataaatttgaggaaattgtttaaaagtgtttataaaattagtagaggattttggttattagtttatagaagagtttttttttaatgttattttttatttaagtttagtttttaatatatagataagaagggatttaaaaatgttttaaagttttaagtagtgagttaaaatatatttttatattttataatagagtatagtaatattaaaatttggtttgtatattttaatattatttttgtatgaattgaattgatttttaggggttggggatgttattggtgatttagatatgaaatttttggtaggagagaaggttatagttattgaaggttagggtagtagtattttgaaggttttttttttttggagtggagaatgttaggtgtttgtttttttatatttt

SEQ ID NO: 351 - DNA, 2501 bp, Artificial Sequence
  chemically treated genomic DNA (Homo sapiens)
agttgggattataggtgtatgttattatgtttggttaatttttttattttttatagagataggattttgttatgttgtttaggttggttttaatttttgaatttaagtgatttatttgttttgggtttttaaaattttgggattataggtgtatagtgttaggtttttatatttttatatatttttttgtttttttagttgtgaaatggagataatgatatagttttaatttatgtgggatgtttagtatagtgtttggtatttgatagatttttttttttttatttgaaatttatttttgagttgggtatggtggtttatatttgtaattttagtatttgggaaaattaaggtaggtagattatttgaggtgaggagtttaagattagtttggtaaatatggtgaaattttgtttttattaaaagtataaaaattatttgggtgtggtggtatatatttgtaattttagttattttagaggttgaggtatgataattatttgaatttggtagatggaggttgtagttgagttgagattgagttattgtattttagtttgggtgataaagtgagattgtttaaaaaaaaattatttttaatttaatataaaattttttgaatttttttttttttgagttgtttttttatttgagtttattttatattattgaatagttaattatagaattgtgtattattttttttgatttttagatttttagttttttatagtattttgtttttttttgttgtattagttatagttgtattttttttttttttttttttgagatagagttttattttgttatttaggttgtagtgtagtagtataattttagtttattgtaatttttgttttttgggtttaagtaatttttttgttttagttttttaagtagttgggattatatgtgtgtattattatgttaggttaatttttgtatttttagtagagatgaggttttattatgttgttaggttggtttagaatttttgattttgtgattagtttattttagttttttaaagtattgggattataggtatgagttattgtatttggttatagttgttattttatttgtgtgattgattattgtatgatgtttttattgaagtgtagtgaaggtaggaaatatgattggtttttataatatttttaatatttattattataggtggtatatagtagggttttaataaatatttgtaaaatgaataaagttaatgagtgtttatgtttgtagttttaattgttttgaagtaaatatttgattttttaatttttattagagtgttttgtatatagtaggtttaattatttttttttttttattaattatttatgttttgtaagaatttagttagttgattttttgtattttataagtgtgatgattgggtgtttttgtgtgagatgtgttatttttgaattttgttatgatgttggtatattgtgtgtttgatatgaagaaaaaaaaaatttagttagtttattaggtatagtggttaaggtttgtaatttttgtattttgagaggttaaggtaggaggattatttgaatttaggagtttgagattagtttaggtaatatagtgagattttgttttaaataataaataaaaataattagttgggtatggtggtgtgtgtttatagtattaattatttgggaggttgaggtgagatgattgtttgagttagggaggttaaggttgtagtgagttaagtttgtgttattgtattttagtttgggtgatagagtgagattttgttttaaaaaaaaaaaaaatattaaattttagaggggtgaaaaaaaattttatagtggaaatatagtaatgagttggtttagttttgtttttgttataatggtttatggtgttggaggatttttttgtgtatgtgtatagtttttggttggttatttttgtgagtgtgttttattttttattgagtgtgtgtgaagattatggaggttgatttgggagtgtgtatgtagttttgttttgtgtttgatttgtggattttgtggtgtttggtttgggtggtttggattgtggagggaatgttttggagggtggagaattgggatgaggttgaggtaggtgtggaggaggtaggtgttgaagagtatggttttgaagaagatggtggggaggagttgggtgttgaggagtttggtttggaagagtttggtttggaggaattgggtgttgaggaggagatggaggttgggtggttgtggtttgtgttgtgtttggtgaatttgtgtgagtttttttaggttattttttgtaattgtagtttgtgtgttgtgttgtttgtatggtttaattttgatggtgagttgtagttttatttaatgttgttgtttggtatgggttgttgtatttatagttattgaggtatgggtttggtgtttaggtttgatttagtagggatgatagtatggtttgaagtttttttattgttttggggtttattttgtagatgg

SEQ ID NO: 352 - DNA, 2501 bp, Artificial Sequence
  chemically treated genomic DNA (Homo sapiens)
ttgtttgtaaaatggattttggggtggtagaggggttttagattgtgttattgtttttgttgggttgggtttaagtgttgggtttgtattttggtagttgtggatgtggtggtttgtgttaggtggtagtgttgggtagggttgtggtttgttgttgaagttgagttatatgggtagtatgatgtgtggattgtgattgtagaagatgatttgggagggtttgtgtgagtttattgagtgtagtatgggttgtggttgtttggtttttattttttttttggtgtttagtttttttgggttggatttttttgggttggattttttggtgtttgatttttttttgttgttttttttagggttgtattttttgatgtttgttttttttgtgtttattttggttttgttttagttttttgttttttggggtattttttttgtgatttagattatttgggttggatgttgtgggatttgtgggttggatgtggggtggagttgtgtgtgtgtttttgagttgatttttgtagtttttgtgtgtgtttggtagaggatggaatgtgtttgtggaaatagttggttggaggttgtgtgtgtgtgtagaaggattttttagtattgtaggttgttgtaatggaggtgaggttaggttaatttgttattgtatttttattataaaatttttttttgtttttttaaggtttggtgttttttttttttttgagatagggttttattttgttgtttgggttggagtgtagtggtgtgagtttggtttattgtagttttgatttttttggtttaagtgattgttttgttttagttttttgagtagttggtattgtaggtgtgtattattatgtttgattaattatttttatttgttgtttgaaatggagttttgttatgttgtttaggttggttttgaatttttgggtttaagtgatttttttgttttggttttttaaagtgtagggattataggttttagttattgtgtttggtggattaattgaattttttttttttttatgttagatgtgtaatgtgttgatgttgtaataaggtttgagggtggtgtattttatatgggaatatttaattattatgtttataaagtataaaaagttaattaattgaatttttataaggtatgggtgattagtaaagagggaaaaataattagatttattatgtgtagagtattttggtggaaattggaaaattagatatttattttagagtaattaaaattataaatataaatatttattaattttgtttattttataaatatttattaaggttttattatgtattatttatggtgataagtgttgaaaatattgtaaaaattggttatgttttttgtttttattgtattttaataaaagtgttatatggtaattaattatataaataaaatagtaattatggttgggtgtagtggtttatgtttgtaattttagtattttgggaggttgaagtgggttgattataaggttaggagttttagattagtttgataatatggtgaaattttgtttttattaaaaatataaaaattagtttggtgtggtggtgtgtgtatgtaattttagttatttaggaggttgaggtaggagaattgtttgaatttgggaggtggaggttgtagtgagttgagattgtgttattgtattgtagtttgggtgatagaatgagattttgttttaaaaaaaaaaaaaaaaaaagtgtaattgtgattagtatgataaaaagagatagggtattatagaaggttaaagatttgggggttaaggaagatggtatataattttgtgattaattgtttaatgatgtgggatggatttaagtggagaagtagtttagaaaaagaagggtttagagagttttatattaggttaaaaataatttttttttagatagttttgttttattatttaggttggagtgtagtggtttagttttagtttagttgtaatttttatttgttgagtttaagtgattattgtgttttagtttttggagtagttgggattataggtgtgtgttattatatttaggtaatttttgtatttttagtagagatggggttttattatgtttgttaggttggttttgaattttttattttaggtaatttgtttgttttggtttttttaagtgttgggattataggtgtgagttattgtgtttagtttaaaaataaattttaagtagaaagaaaaaaatttattaagtgttagatattgtgttaagtattttatgtgaattaaggttatgttattatttttattttatagttaaggaaatagaagggtatataagaatgtgaaggtttagtattatatgtttgtaattttgagattttgggagtttaaggtaggtggattatttgagtttaggagttggaattagtttgggtaatatagtgaggttttgtttttataaaaaatgaaagaattagttaggtatagtggtgtgtatttgtagttttagtt

SEQ ID NO: 353 - DNA, 2401 bp, Artificial Sequence
  chemically treated genomic DNA (Homo sapiens)
ttattaaagaaaaaaaagatgatttattagatagttgttaaggtatttatataaaattatatgatagtaggatagatggtaattaagagggaatttaggatttgttattattagttggaaatatttgatttttagtttgtaaatgtgataagttagattaatattagtaggatattgaatatagtttgtagggatgagtttttgtgttatttttggatatgtgtttaagtaattagaataatttaaaatgttattaggtttttgttgttatttttataaattttgaatagtgagttgggtttttaaggaatttgtttttgttagtttattttatgttgtataataaataggtttaaagtttttggtagtgtatattaagtatggaggattttttatttattatgatagtttttttgttggagggttggggttgtattttatttttttttttggaaggggtggtttttgtttgaggttttatttgttttatagtagagggatgaaatggtaggattttggttttgatgggttttatttggtaatggtatatgttaagtgggttatgttttattgtttagagtaagttatatggttatgtttgatattgatgtgtgggaaatgtagaatttttttgtatttggggaggtagatatttggataatatgtaatttattatagggttagttggatgaagaatggttaagggtttaggttttttattttgagttaggttgaattagttggggttgtgagattaagttatggttattagtgtttgtttggaattatgttttgtttttgttgtgtttatattgtagtagggtttttgttttttaatttatttgaaattggtggtgggtgtggtatatagatgagaaataggaattttttatgttgggttttaataggagttgtggtgggaatataaatggtgtagttattttggaagatagtttggtggttttttataaaattaaatgtattttttatatatgatttgttatatattatttagtaattgtattttttggtatttgtttagatgagttaaaaatttgtatttatataaaaatttgtatgtggatgttgatagtagttttatttataattgtttaaatttggaagtttttaggaggtgagtgggtaaataaattgtggtgtttttggttagtggaatattatttagtgttaaaaagaaatgagtttaagttatggaaagatatgaaagaattttaagtattattaagttaaagaagttaatttgaaaaggttgatgttgtatgagtttatatttatgatattatagaaaaggtaaaattataaagatagtaaaaggattagtggttgtaggagttagggaggagggagggatgaataggtggggtatagaggatttttagggtagtgaaattattttgtatgatattgtaatggtggatataggatagtaagtatttgttttttattttgtagaatgtatggtattgagaatggatttttttgtaatatatggatttttagttataatattgaattttttttggggttttgtattgtttgtagtgttttttaatttttgtttttgttttgtttattgttttttttttttgttatagtgtgtttgttttgtggttgttaattagttgtgtgttttggttgtgtgttttgttttgtttttggtgggtgtgtgtgtggttaatgggtggtgtgtgggggttgggttgtggtggggtggggtagtggggtggttgttaattgttgtggtgttgttgaaattgaaaatattatattatgttaattgtggttgggtttgtgtgtatgggggtggggtttgtgtgtataaagggggtgtaggtgggttgggtgttttataggttaagtgtgttgtgtttgaggggtgttggttaggtttgagtgagtgagttagttagtaggtattgagggggtgtggttgttgtttggatgagataggtgaatttgatgtagaagagtttattattggatagttaggtagttgttgtgttttttgtatatgtagagttgggtggtgtggggttttttttgtgtttggtttttgtttttttttttttttttttttttttttttttgttgttttttttttttttgttgtttgtgtttgtgtagttttgggttatgtttgatgtgtttttttgtagtatatttatgatggagtgttttgttgtttgtgggatttttttagtattagtgtgtattagtgtttgttgtagtttttttgggttggtggattatgaggagttgagttgtgagttgtaggtttgtttggttgagttgaatgttgaggattagaattgttgggattatgatttttagtaggatatgttgttgtggggttttggatgtttgtagtggattgaagtgg

SEQ ID NO: 354 - DNA, 2401 bp, Artificial Sequence
  chemically treated genomic DNA (Homo sapiens)
ttattttggtttattgtaggtgtttagggttttgtagtggtatgttttgttggaagttgtaattttagtggttttggtttttggtgtttagtttggttaggtgggtttgtagtttgtggtttagttttttgtggtttattggtttgaagaggttgtggtaggtgttggtgtgtattagtattgggaaggttttatgggtgataagatgttttattgtggatgtgttgtggagggatgtgttggatatggtttggggttgtgtaaatgtgggtagtgagagaggagaggatagtgagaagaaggggaaaggagaggaggagagggtggaggttgggtgtaagggagattttgtgttgtttgattttgtgtgtgtgagggatgtggtggttatttggttgtttggtggtggatttttttgtgttgggtttgtttgttttgtttggatggtagttgtgtttttttgatgtttgttggttagtttgtttgtttaggtttggttggtattttttgagtatagtgtatttggtttgtggaatgtttagtttgtttgtgttttttttatatgtgtgggttttatttttgtgtgtgtgggtttggttgtgattagtataatgtagtatttttagttttaataatattatggtgattggtggttgttttgttgttttgttttgttgtggtttggtttttgtgtattgtttattggttgtgtgtatatttattgggggtggggtggggtgtgtggttggggtgtgtggttgattggtggttgtggggtgagtgtgttgtagtaggggaagggggtggtgagtggggtgggggtgggagttaaagggtgttgtgggtggtatggaattttgaaagggatttaatattataattgaaagtttatatgttataggagggtttgtttttagtgttgtatattttatgggataaaggataaatgtttattgttttgtgtttattattatagtattatataaggtagttttattgttttaaaaattttttgtgttttatttatttattttttttttttttttagtttttgtaattattgatttttttattgtttttgtagttttgttttttttataatgttatagatgtgaatttatatagtattagtttttttagattggtttttttgatttaataatatttaaggtttttttatgtttttttatgatttgagtttatttttttttagtattgaataatattttgttgattggaggtattatagtttgtttatttatttattttttgaaggtttttaggtttgggtaattatgaataaagttgttattaatatttatgtgtaagtttttgtgtggatgtaagtttttgatttatttgggtaaatattaaggggtataattgttggatggtgtgtggtggattatatgtgaagggtatatttagttttgtaaggagttattaaattattttttaaagtggttgtattatttgtgtttttattgtagtttttgttaaagtttagtgtggagagtttttgttttttatttgtgtattatatttattattaattttagatgaattaaaaaatagaaattttattataatgtggatatggtaaggataaggtataattttaaatgaatattgatgattgtggtttgattttatggttttggttggtttggtttggtttggggtgaagagtttgggtttttggttgttttttatttagttggttttgtaatgaattgtatgttgtttaaatatttgtttttttaaatgtaggaagattttgtattttttgtatgttaatattagatgtggttatgtaatttgttttgggtagtgaaatgtgatttatttggtatgtattattgttaaatggagtttgttaaagttagggttttgttgttttatttttttgttgtgagataaatgagattttagataggggttgttttttttaaaagagaaaatggagtataattttagttttttagtgaagggattgttgtggtgagtgagagattttttatgtttgatgtatgttgttaagagttttgggtttgtttgttatgtagtataaggtaagttgatagagataggttttttgaagatttaatttattgtttgaggtttatgggaatgatagtaagggtttggtggtattttgagttgttttggttatttggatatatgtttagaaatgatgtagagatttatttttgtaagttgtgtttagtgttttgttggtgttggtttagtttgttatatttgtaggttggaggttaggtgtttttagttggtagtgatgggttttgagtttttttttggttattatttattttgttattgtgtagttttatgtgagtgttttaataattgtttagtaagttattttttttttttttgatga

SEQ ID NO: 355 - DNA, 1508 bp, Artificial Sequence
  chemically treated genomic DNA (Homo sapiens)
attttataattataaatatttagtgtattttgtaaatatggtataatttgttggtataaaattttattgttttagaaaatattggtaataaaattatagaaaagttaaagatttttattttttattttgaagtgtttgggagatattttagaaatggatgggaaatgttaaattttgtatgtttgtttatttttttttttatattgattagatgtaaatgagtgttattaaaagtatattataggtatttatatagattttttttataagggatttataaagtttagatgtgaaatgtattttaaagggtttttagttgttttttatttttttttttgtgaaatagggaagatatatgtgtttttaagggtagagatggaatttgggttaatgggttggggggtggggggaagttggaagggattgttttaggatatggtaggatagtggattgtttttgttgttttgttgtttatattggggttttttgtaggtgtgttggttttttttttttttgttgagaagaagttttgttaaaatatttgttttttttgggaatttttttgtgggtttaaagtgggaaaatgttgttttaggtttaaaataatttgtttaagttttttagtgtgggagaaatgtttttatttgttttttgtttttgggggtgttttttgttttttgttgttagaattttggggagtgtttagatttggggtagtatatgtttgggttaattgtgagtagaataaatttttggtgggtggttaggaagtttttttttagttattgtttttttttagtgtttttttttttttttatataatataagattttttttttttagtttttttaaagtatagtttaaggaaatttttttatagtttttatttagttatgggttagtatgtttgggggtaaatatgtagatttggaggtaggtatttgtgggggggtgttggtttgggtgtgtggggaagtgtttgtttttgttatttgtttttttaaatattttgattgttgatttggttttttagttttttttttattttggagtatttttttggtgttggtattgttgaagaatgggtttgggtggggaggtgaagagaagttaggaatgttttatgtttttttaatggagagggggttttgggagtttttgagttaggaggatatggaaaaggggattggggttttgagattgggtttgttgggtttaagatgtgttttttggatgggtttaggatgtttttttgttgtgggaattttgtggtttggttttgtttgttgggggtttgaaaaagtggattgtagggtggaaggtgttatttatttgagttttggggatagtttttgggattttttgttaagtgtttaaaatggtaggtttttaagtggtgtgtggtgtttttgtattttttaaaatttttgaaatattttaaaaatttttttgtattttggtgtttggtagggttttttaaaaaaagtaaattttttttttaaatgta

SEQ ID NO: 356 - DNA, 1508 bp, Artificial Sequence
  chemically treated genomic DNA (Homo sapiens)
tgtatttgggagggaggtttattttttttggaaaattttgttagatgttaagatgtagaaggatttttgagatgttttaagaattttggaaagtgtaaaaatattgtgtgttgtttggggatttgttgttttgggtgtttggtggagagttttggggattgtttttaggatttgggtaaataatattttttattttgtaatttatttttttgaatttttagtaggtagggttggattgtggggtttttgtgataggggagtattttagatttatttagaaaatgtgttttgggtttaatagatttaattttaggattttaatttttttttttgtgtttttttagtttaggggtttttgaggttttttttttattaggaaaatataaaatatttttggtttttttttatttttttgtttaggtttattttttagtggtgttaatgttagaggagtgttttgaagtggaaagagggttggggggttagattagtagttgggatatttggagaggtagatagtagaagtggatatttttttgtatgtttgagttggtgtttttttatggatgtttatttttgagtttatgtatttgtttttagatatgttggtttgtggttggatgaaaattgtgaggaggtttttttgggttgtgttttaagggaattgaggaaggaagattttgtattgtatggggggaaaaaaaggtattggaggggggtggtggttgggagggagttttttggttgtttattaaaggtttgttttgtttgtggttggtttggatgtgtgttgttttgggtttaggtattttttaaggttttggtagtagagggtggggagtatttttgggggtagagagtgagtaagaatgttttttttgtgttggggggtttggatagattattttaaatttgaggtaatatttttttgttttgaatttatgggggggtttttgggggaggtggatgttttggtagggtttttttttagtagggggggagggagttgatgtgtttgtagagagttttggtatgggtaataaggtggtagaaataatttattattttgttatgttttaaggtagttttttttaatttttttttattttttggtttattggtttaagttttatttttgtttttgaaaatatatgtgttttttttgttttatagagggagggatgagagatggttaggaattttttagggtatattttatatttaaattttgtggattttttatggaaggaatttgtgtgggtgtttgtggtgtatttttggtgatatttgtttatatttagttggtgtggaaagaaaaataagtaggtatgtagaatttaatattttttatttgtttttgaaatgttttttaaatgttttgaaataagaaatgaagatttttaatttttttataattttattattgatattttttggaataatggaattttatgttaataggttatgttatatttgtaaaatatattaaatgtttataattgtagaat

SEQ ID NO: 357 - DNA, 1984 bp, Artificial Sequence
  chemically treated genomic DNA (Homo sapiens)
  unsure (9)..(17): unknown base
  misc_feature (9)..(9): n is a, c, g, or t
  misc_feature (17)..(18): n is a, c, g, or t
  misc_feature (33)..(33): n is a, c, g, or t
  misc_feature (41)..(41): n is a, c, g, or t
  misc_feature (49)..(50): n is a, c, g, or t
  misc_feature (52)..(52): n is a, c, g, or t
  misc_feature (54)..(54): n is a, c, g, or t
  misc_feature (62)..(62): n is a, c, g, or t
  misc_feature (80)..(80): n is a, c, g, or t
  misc_feature (84)..(84): n is a, c, g, or t
  misc_feature (127)..(127): n is a, c, g, or t
  misc_feature (157)..(157): n is a, c, g, or t
  misc_feature (159)..(159): n is a, c, g, or t
  unsure (175)..(207): unknown base
  misc_feature (175)..(175): n is a, c, g, or t
  misc_feature (207)..(209): n is a, c, g, or t
  misc_feature (214)..(214): n is a, c, g, or t
  misc_feature (1181)..(1181): n is a, c, g, or t
agttttagntattattnntatttttattaatgnttttgggnttataggnngngnttttttgnttaaatagtagttaatgnaggnattttaaaaggtatattattttatatttatttagtggttatgntattatttaatttttattataattttgtgngnttagtataatttgtgnttttattttatttgtgaataaatggaggtagnnntttgngtaatttataagtaagtggtagatttgggggttgtgtttagataatgtggttttagattttttgtttttttttgttttttgttgtattttgattgagtttagttatttatttttttaatatatattaattgttgtttttatgttttaggttttgtgttagatgttagaaatatatttttatttattggattttggtatggtttattgtttagtgttttgttatgttatgtgttatataatgtatttattttggtatttagtttatggaaaataatgttgaaagatattgtatgtatgtttttataataaaattatgtaatttatgttttttttattgttttggttattaggaagtttttatttaaattagagtaaatatattagaatttgggtttgttattttagtttgttgaatttttttttttggtttagattttttattttggtttataaattttattgtataaatgttttttattgtaaaatattttaaattttttttaagggaaggttgtatggaaatgatatagtaaggttttttttgtatttttttagatttttattagggaaggtagatttagatgttttttttatttttagttttaaagttttttatttataaaattttttaagtagtgattattgttgttttgagtatttggaggtagtttagagtttttgaaaggtaaaatttatatataaaaagaagttttttttgatttagattttagttttggtgttagatgtatatttgaggagtaggtggttagttagatttttatttgagtagttaataaaatttattgttttttaatggaattttttttgtaagtttgaattgatttgttatttttgtgatttgtgagatggtagggaagtattaaatattattatgatttgggttatagtggtgggaaaaaaggaaaaaagaaaaaaaaaatttattgttaagttttgttaggtgtanaaagggttggaattgttggggttattttatttgatttattggaaatagagtggattttattaatattttaataaagagaatttttttgtattaggttggaagtggttgttagttttttgtgtaattttattttttggaaaagtggaattagttggtattgtttagtgtgatttgtgaggttgagttttaatagtttaaagaagtaaatgggatgttatttttgtggggtttgttttttgtgaggtgtttattttgtatttgttatgtaaaatgagggagtgttaggaaggaatttgttttgtaaagttattggttttggttattagtttttatttaatgtttttgtgatgttgttgttgatttatttgggaagttggttggttggtgaggtagagtttttttttaaagtttggtttttatggaaaatatgtttagtgtagttgtgtgtatgaatgaaaatgttgttgggtgtttttagttggataaaatgtagttgagaattttgtttgttttgtgtgtttttttgttttaggtagggaagaggggttgttgggtgtgttttgtgttttgtttttgtatttggattgtttggtatgggtagggtgagggggtttttggggggttggggtttttggttgtggtggtgaagatagattggggtttggtagggaggttattttgagtttagagattttaggtattttttatatataggtttttattttggtgtgtgtgtgtgtgtgtgtgtgtgtgtgtgtgtgtgtgtgtgtgtgtgtgtgtgtgtatgtttgttaatgggagga

SEQ ID NO: 358 - DNA, 1984 bp, Artificial Sequence
  chemically treated genomic DNA (Homo sapiens)
  unsure (804)..(1771): unknown base
  misc_feature (804)..(804): n is a, c, g, or t
  misc_feature (1771)..(1771): n is a, c, g, or t
  misc_feature (1776)..(1778): n is a, c, g, or t
  misc_feature (1810)..(1810): n is a, c, g, or t
  misc_feature (1826)..(1826): n is a, c, g, or t
  misc_feature (1828)..(1828): n is a, c, g, or t
  misc_feature (1858)..(1858): n is a, c, g, or t
  misc_feature (1901)..(1901): n is a, c, g, or t
  misc_feature (1905)..(1905): n is a, c, g, or t
  unsure (1923)..(1931): unknown base
  misc_feature (1923)..(1923): n is a, c, g, or t
  misc_feature (1931)..(1931): n is a, c, g, or t
  misc_feature (1933)..(1933): n is a, c, g, or t
  misc_feature (1935)..(1936): n is a, c, g, or t
  misc_feature (1944)..(1944): n is a, c, g, or t
  misc_feature (1952)..(1952): n is a, c, g, or t
  misc_feature (1967)..(1968): n is a, c, g, or t
  misc_feature (1976)..(1976): n is a, c, g, or t
tttttttgttaatgaatgtatatatatatatatatatatatatatatatatatatatatatatatatgtatgtatgttagagtgggagtttgtgtgtggggggtgtttaggatttttgggtttggaatgatttttttattgagttttgatttgtttttgttgttgtgattggaggttttgattttttgaaagtttttttattttgtttgtgttgggtgatttgaatgtagaaatggggtgtagagtgtgtttggtagttttttttttttatttgggataggagaatgtatagaatgagtggagtttttggttgtattttgtttgattagaagtgtttggtggtgtttttatttatgtatgtggttgtattgagtatattttttgtgggagttaggttttgaggagaggttttgttttgttagttagttaattttttaaatagattagtagtagtattatgaaagtattgggtagaggttgatgattaggattaatggttttataagatggatttttttttaatgtttttttgttttgtatggtagatatggggtgagtattttgtgaggagtgagttttgtggaggtggtattttatttgtttttttggattgttggggtttagttttataaattatgttgggtaatgttagttgattttatttttttagagaatggaattgtatgggggattggtggttatttttagtttagtgtaaaaagattttttttattaaaatgttaataagatttattttatttttaataaattagataaaatggttttagtagttttagttttttntatgtttggtaaggtttggtagtggattttttttttttttttttttttttttttattattgtggtttaagttatgatggtgtttggtgtttttttgttattttataaattataaagatgatagattaatttgagtttgtagaaaaaattttattaaggggtaatagattttattaattgtttaggtgagagtttgattagttatttattttttaaatgtgtatttggtattaaagttgggatttggattggaaggaatttttttttgtatatggattttattttttagaagttttgaattatttttaggtatttagaatagtagtagttattgtttaagggattttataaatggggggttttgggattgagggtaagagggatatttaggtttgttttttttaataggaatttaagaaaatgtagggaagattttattgtattatttttatgtagtttttttttagaaagaatttaaggtgttttataataaaggatatttgtgtaatagaatttatgaattaaaatagaaaatttgggttagaaggaaaagtttagtaaattgaaatgataagtttaaattttaatgtatttgttttgatttggataagagttttttgatagttaaagtaataaaagaaatataagttatatagttttgttgtagaaatatgtatataatgttttttagtattattttttatgggttaaatattggaataaatgtattatgtaatatgtaatatagtaggatattgagtaatggattatgttaagatttagtggatggggatgtatttttagtatttggtatagggtttggaatatggagatagtaattagtgtgtgttaaagaaatagatggttagatttaattaagatgtagtagaaggtagggaggggtaaggagtttggagttatattgtttaggtatagtttttggatttgttatttatttgtaaattatntaaannnttgtttttatttgtttatagataaaatgaaantataaattgtattgantntataaggttgtggtgaggattaagtgatgntataattattgaataaatataaagtgatgtgttttttaagatntttntattggttgttgtttggntagaaggntntnntttgtggntttaaggntattgataaagatgnnagtgatgnttgaagtt

SEQ ID NO: 359 - DNA, 17897 bp, Artificial Sequence
  chemically treated genomic DNA (Homo sapiens)
atattgtataattttttatttatgtttaaagtaaaggatttattatatattttgaatatagtttattttttatttttatttggaattgttttttttttatggttttttttttttttaatttttattgtttataatatgatattataggttaggtatgtttgtagataattgggataatttatttttatttaagtaaaaattttagatggtagtttttttatttgggattatgaagtaggtaggattttttttttttttttaatagagtttaagtagtaagattgaataagatgggatgaatttaaagagaaatatttgtatttgtttagttttttaattaatatttattgaatttttttatggttaggtgtgtaagatgttaggagggatgagataagatgatgatgatgatgatgatgatgatgatgatggtgatgatgatagtgaggatgagggtgaatattttaatgagagttttttatatgttagggattgttttaggtattttatatatattaatatatatatttattataatgattttgtattgttatgtgtattttatatatgaggaggtagaggaaggaaatgaaataatttgtttaagagtatagagtttgtaagtggtaaagataagatagaaataattttttaagagtagagagtggtgatttttggggatagggaagtggaaaagtggggagataaaggttgttgttttttttaataagttttgaagatttatttgattaggtttaagaaaaatttgataattattataaagtaaaaggaagaggagatgaggtgggtttttgggtatagatgtttgttttggaaagtttagggaggaaggggtgagaggaattgggttgtagtataggaatgggggatttgggaattagaggggattggttagggtgggttattgattgtagtgaatgtttatttgttgattgggttgtagtataggagtggggggtttggaattaagaggggattggtttagggtgggttattgattgtagtgaatatttatttgttgattagtttgatttagaagaaagggagagatggatgttggaggagagagggggttttgagggagtttaggattggaggtgggaagatatttttatggatatttttttattttgatagatagaaaagatgatggtttgtagtagtagatttataaattgtgattgaaaggtttgatggttttttttatttgttttttttatgtatagagaggtggagtaatttgttttaggtattatagtttataagtggtgaagttggagttgggggttatagattattgggtttttttttatgaatttttgttgtattttggttttttttaattttgagtatttatgagttttaagaaagatagttgggaataggtgatttttatggttatttttggaatatttggttagaatattttagtataaaatttaagttgttgttaagtagaaatttttagtggatattagtttagaaaatttaattttattttgtgatggatttgtagtgtgtgtgtatttattaagtaaatttgattttattgttgattagtgagaaagaggaataatgtaaatagttagtgtaattgtatttatatttagttttgtgagtttttgttattttagttggttgtggtgggggatgtggaggtgtatgtagtttttaggttttagtgaggggtttttgtatagggtgggtgttttttatgttttatgtgtatttaggtttgtattaaagatagttttttttttgtagtgtgatatttagttaagaaaattattttatttggtgtttagtggaagaaaatattttttttaatagggaaggaaaattggttgtgttgggttgagggaggggagtgtggaatttaaatggtgttttttttaggttttttttaaggtgatgtggattttgattttagaatgttattatttggaaaattgtgttttattgtttaaatttttgttttttttttttgtttttttttttttattttatttttttttttttgttttttgatttatttaatgttaatggttttttagaaggttaggttttttatataagtttagttttttgttaggtaatttttttggggttttaagttgtaaatttgggttgttttttgtattttgttttgaggatttttttaaagagataggtaagggttttttttggtaaaatgtttttttaattttatgtattagttttatttgttattgaagaagtgggttgttttttttgtgtttttgaatttgatattttttattttgatattttgtatttttgaatttgatatttttgtatttttagtaggtaaaaaattaaaggtgtttatttaataaattgttgtaatggggagtttatgggaaaatgggtatgtgtaagttggttaaaggataataggtatataggttgtttgatttgggagggtttttagatagtaggatggtttttagagatgtatttttgttgttgttgttgtttatgattatgtttttagggtttagaatggtgtttgggtatagtaggtttttaatatagttagggaatgaatgagtttattttaattatgttgtatggatggagaaattgtgttttggggttgtattatgttatgtatttgtagaaaatgtttttgtttttttagtttttttttagtggtggagtataggatttagtttataagagtagtttaattttgttatttgtggaatgatagaataaataagttttagggtttagggaggtaaggtttttgttttagttttttaagtagttggaattatagttgtatgttattaagtttatttgattttttatttttttgtagagatgatgttttattatgttgtttagatttttttggaatttttgggtttaagtaatttttttatttttgtttttgaagtagttgggattataggtatttgttattaggtttggttagtttttattttttttgtagagatgggatattattatgttgtgaaggttggttttaaatttttggatttaagagaggtttttgtattggttttttaaagtgttgggattataggtgtaagttattttatttggatataatattttatttgaaataagaaaaatttttttttattgggaatgttgtagttgaattagtttaaatttataaagaatggaagattgtttagtggttatttatttatttattaattttagatgttaaattttttagggtgggggaatgtgtttttatatttaaggtatttttgaatgtagttaaattttgtagtttagttaaattttatagttaatagttaaattttgtagtttagttaaatttttttagtagtaaaatttatgatattggaattttgttttttatattggttatttgtaatagaataatagagttttagtattagataggttttgaaagattattgaatttaattttttttttttgttagtgagaattttgaagtttagatttgttgatttgtgattgatagtgttaaagataggtttgaaatatagatgttttgggttttagaggtgttgtttgtttttttttatattttttttgttttagaaaatttttttttaaaattggttttaataattagaggggaaagttatggtttttgttttggggatagtatgggttggtatagaaaagaggtttataatttagtaggaagtgttgtgtgtgtgtgtgtgtgtgtttgtggaggtgtagggagggttatttgagtttgttttgggtttggttttgggtttagtggtaaatttaatgttgggtaggtggtttgaggataatgatggtgttagttgtgagttagattttttttatttataaaattatgtttttttatgtagtgttttttaatttggttgtatgttaggagttatttgggtagttttgtaaaaattttaatgtttagttggtttgtattttttgagattttgattaaattgttttggagtttatttttttttttttattatttatttatttatttattttttaatttggtggtttttttgggattttttatatgtagtaggggttgagaattgttggtttttttggttagatgggaatatgtaggttaatagttatgtataaatagagtagtagagtaggatggtgttaaggttggaaagggtgagttatgaaagtttaggaaattagaataggaaggggtgagaatttttttatttgggtttgtggggtaggagagaagagtttagtgggtaaggtttagtgagtgtgtttagaattgggaagatgaggggaagggtaagtgttgggtggtggtgggtaagatggatgagattaaatgggagtgaggattttagtgagagttttggtgatatggaaggttgagaattggagggagtttgttgggtgaaagtgaaggtggttgttgggtaggtagttgaatttggttggagagttgagttggtgagatttataggaagtgaagggagttgtttagggtgtggtgtaatgagatttttagaagaaattttgaggtagagatggggggtttttgtttatatggagatataaggaagtttatatgtatatgtatgagtgtgtatatgaatatgtataagtatataaatgttttttttgggtagggtatatgtgtttgttgtataggttgaggttttggatttggaggggattgtagagttgatttataatttgggttttgatgttttttttggttgtgtttttatgattgtttgtgtaataggtggtggttttagtgggtgtttgttgtgtgttgttggagtttagtttagtttggtgtgtttgggaggagggagtagggagtggggaaggggtgtgttttggttgtgtgttgggattgtgagggtttgggaggggtgaggtgtgggggtggggttgtggtgtttataaagttgttttttgtttggatgtaaataaattttgtttggtttttagttggtgttgaagtttgttagtttattatttgtttttggtttttgtggggtgttgggttgttagttttggtattgttttttttttttttttttgtgttaggtaagtttgtgttttttttttttaggtgtgatgtggagtagaaaggggttgtttgtgtggtgttgttggagtgttaggattgttttttgtagttttgtgtattttaggagtaagtgttttggagttgtaagtgtgtggttattttggggtgtgggtgtgagggggttttgggtgtagatattgttgaagtggggggtttaattatggaaagggaggaaaaaaagatagggttttatttattttttttttagttggggattggggttttggaggttgggaagggggtgatgagatggtttgaaaaaatattaggatagtgttttttggtgttgtttttgaattttagttggtgttgttggtaggggtgtgtgttggatgtgggtgtagaagggattaggtgagtgtgtgtgtgtgtgtgtgtgtgtgtgtgtgtgtgtgtttgtgtttgggaatggagagattgtgtgtgagtgtgtagatgaggggttggtagaggtgagtggtgttggtaaggaggttggagaggggggtgtgggtgtgtttggtttgtagattgggttgggaatgggtgtggatttgagaggttggtggtgttttagttttgtagtatatatagggtggtgtgtatgtgtgagtgtaagtgtgtgtgtggggggagggtttagggtgtgttatagtgtaatatgtgagttggagtaagtgtttgtgagtgttattgggtagggtgtgtttttggaggaatttgggattggtgtattggtggtgtgggagaagtgatttgggtgagaggggttttgtggatatttggtggttttttgagttggttggagttaggagtggtgttatttttgtttttgtttatttttttttgtttttttttttttttttgtttttggtgttggttgtttttgttttttatgggggaaaatagttggaattattttgatgtttttgggggatttgttgtggtttttgatttagttttgggaggagattttgggttgggtttggggaatgtggttggttttgggggaaatatgttgttatgtttttgttaaattagtagttggagttgggatttagtgggttggttttttatttattttttttttatattttttgtttgttgtttttgttgtttttgggggttttgaatagtatgtttttgtggtttggaagtgggagatgtttggtagtgggtgggggaggtagggtttttggttattttatgtttatttaagaatattttttttttatggatgttgggggtattttagtttgtttggtttttttaagttattgggaaatatttaatatttagaagttagttagtggttaggtaggagggtggtagatatttttataatatttattagttgtatgggatttttttttaagttgttttaaaagaatatatttaaatataaattttttgtttttgttgtagaaatgtagttttaaggtgaattttttagtttagattttttttgttgagaaattttggtgtttttattgagttttataaatgtgattgaaataagtaaggtatagagggggtaaattttagtgttttttttggaagggttgttttttggtggggaagatatatggttggagatgtagattggttttgtgtggtgtgtgtggtggtagagttagttttaggttggggtggtatagtgttggggatgaaggaaggtgtaagggagagagagggttttggtgtggatggaaaattgggtgtttttttgatttgtgattttttagttttgtgggattgtgttttttattgtatttgggtaaggaggaggatttgtttgttttgttttgtaatttggtttttggtttagtgtttggtaggtgggaggagttgaaatatgtatatgggatgaagtggatggttttgggttttttgttttatttttttgtgaattagtaggttgagttttgggtgaggtaatagattgtgtatgggtggaggtgttggtttttgtttttgagggattttggagtgtttgtttgggttttttgtgaggaagtttttttggagtaataaagtttgattatttggaatggaataaaaaatttatataggatttatttagtttaatttttttttattttatagatggaaaatgaggtatagggatggggagggatgtgtttaggttgaattgagttggagtttagttttgtgagaggtttttgggtgggattgaaggtagtggaaagggtttttggtaggattttgtttgtttgttatggaggggtgaaaggaaattgtatttttattgaatttttggtgaggaaatttttgaggttaaaggggtagagtggaatgattttttttaagtgtaaattaggtgtttttgagagattagtaaagttagtttgaagggtaggggtttagaggttgtagttttttgagttggtttttgattgaatggggttgttttttttttatgatagaagatagattttaattgagttgagggtttttttgggttatgttgaaatttgttggtttgaatttgtttttttatggatttgaaagaaagatagtattgtgttttttgggtggtttaaagttgtagtttttttttgggatttaattttagagaattttattttagatgtgatttagaggttttgttttgggagagaaagtgtgatgatttagtatttgagatttaagtagggtttaggtttgatttagtttggaaggaaggttagggagggatatgatatttttttttttttagagtagttattgtttttttttatttgtttttatttttgtaagaatgttgtttggattgtattgttttattgaatggatgaggtaattgaggttaggagagttttaggatttgtttgttgttatatggtttaggtgggagagttagattttgaatttggatagttggattttagagtttttgttttttttttatgataatatgttggggtgtttgaagaaattaggtttaaatgaaaaggtagttaggagttttatgttttagtttgtttttttgtaaaatgagagtaatagatatgatgttattagaatgtgtaaatattaatttgtgtaatttgagaatagtattgagtatgtggaaaatagtgtgtaggtgtttgttgttagtagtatttgtagaagatatttttaaggtatttttttggtaggtagagtttgggattttttgttttaaatttatttaaggttgtgaaagtgtttgtaaatgtttgatttaggtattgttttttgttaagtttatgtaggttgtataatagtgttatgaaaattttgtttgaaatgtatatttttaggtttggttttttgtgattttttttttattaggggatatgttgttgttttaaagtttttttggttgggttgggaatggggtattttgtaggtagatagagttgagaatttttgttttggaatgataggggagagaagaaggaaggtgtagttatatatgttgttgtatttttaggttattttgtgtttatagtgttagggaattagtgagtgtttagtaaatagtttttgtttgttatagtgttttggaggtttaatgtattatattagttaattgaggtagaagatattttttttattttttaggttagaaaattgaggtttaggttggtgatttttttgtttagagtttagtgagtggggttttgtttaaggtgagttttttgagttttttttattttttaatattgtgtttggaggttatttatattttttgggtttattttttgagaaggagtttgttttttggatttattttaggttgttgtttttgttttttttgatggttgtgtgatggaagtattgtgtgtttatttgttttttattttttaatttggagatagaggtaggttagatagtggttttggttgagaatttagtttaggtaggtaggtagaagggttggggatattgaggttttataggaaggtggttgtagaggtagagggttatgagtaggtgttaatttggagttgtgtttttggggtgggggttatgtgaaaagaaatttgggtttttttgggtggggtgtaagttttagtattatagaatgggaatggattatataattggggttataagtaggtttttttgatttagatttttgatttttttatttaatattgtttgtagatttgtttatgttttatttgtttgggttttatttttgattttttgagtttagtgggtttttttgtaattgagttggtagaaagtgaggttttttaatagtttgggggttttgagtgttttttttagtagtttaattttttttttttttaaatttgtggggagattttttgtagttatatattttaaatttgtatagagttttgtttgaagagaggtgggtgggggtttaggtttttattttgtttttttgtttttattttttgttttatttttatggaatttaagaagattttaagtaattttttttaaatatggatgtgagagggttatttaagaggtgggtttatggttttttttagttgggaatgtttattatttttttttttttttttttaattatggaattttttttttttttttagaaaggtttttttggttgttttttgttggaggggaggttgggttgggttttttttgggatttgtttatgttttttatgaaatttgagagtttgtttttagtaggtgttgtgttagtggtggtggaaaggatatttttattgattaaggaagtaatttggattattttgtatagataagattggaggtttattttggagggtggaaattgtaagattattttggggaaggattttgttagtgtggttagtattttattttgggataaagggttttgtatgaggaagttatttttttgttttttgttaatattggttttgtttgtgtgatttttataaattattttagattatttagtgtagtttatgtttgttttgtaattttataaaataattttttaaggagattagtgtttttttttggatttttagttatttattttgtttttttagatggttgttttttgtttgttaaataaattatttgtgttgttaaaattttattgagaatttttaggaagattttggttgtattgtagaaaagaggtgggttttgatgagatttttgatatttttttttttttgttgttgtgtttgggatatttttgttgatttttttggtgttgtgtttaagttgaatatatagtagtttagttttagttttagtttttttggatttatatttagggagtgaatgtggttttggtttgtttgagagggagatagtggggtttatttttttagtgattttttttttattttttgaatattaaatattattgatgttttttgggttttaggttttattgtaaagtataggggtttttgaggagtttttattgtggttttgttttttgatatttgtattgtttttttgattttgattgttttgatatagttttttaatttttaaattagggaatttttttgaaggtttagtgaatttatttatattgtttgttgagttgattagttaagaaagatagtttgtgaagattgttaatttttttattttttttagggttttgagttttagaagggttagaaaatattaagagagtttatgaattgttttgtagtttgattttaaaatttttttgggtaaagaaatgataaaggattgtatttatagtaaggtagggttatttagggtttattttaaggtggttttttttgaggtttaggtagaaatggtgttgtttttggtaattttttggggaagttgttatagtaaatagttatagtatatgttgattttttttttttttttaaaaatttgttttataaagagtataatgtgttggagagaatattggtttttatgtggttttaaaattaggtatgttatagagggtggaatttgggttagttgttgttggtgataattgatgttatttttgttagtaatttttgtttgttttttttttatttgttttattgaaggtttttaggggattgttgtttgtttttttttgagggaatgagtgttatatttgtatttataataaattagtgagttttttattttttttttagtagggaggaatttagatatgtggtttttggaagttaagtgggtttttgtgtttgtttttgagttttaggttatttatttgtgaattgggtataatatttagttttttttggggtaatttttttgaggagtaagtgaaatagtgtgttgagtgaatgtttttttaaagtattgagttggttgttttaggaaggtattatgggggagttgaaaatagagaattttttgggtgttgtgaagggagaaaagtttaagatgttggttttgttaaaagtttaagtttgtttatgatggtttagtggtgattgtagggtggaggagaggtatgtgattgttttagttgatttttatatgttgaaagttttatggttatgtgtagtttattttataatgttgtatttgggttatgggtggtggtgaggattgtggatatatttagggtaatgtgagattattgttaatattttttttaaggttgttttaattttaaagtagttagtttgatgtttgttgatttggggtatatattttaattttttgatgttttagtttttttgtttgttaaatggtgatatgttggtattttttttttagggtttttgtgaggtttaaaggaagtattgggtttagagtttagttagtgttatagatattgtttttggtgttgtttttgtggtgtgtttgtgtagggttatattgttgtttttttgtggttgttttttttggtgggtggaatttggaatttttagaatagattatggatgtttttttgttggatatttttttagttttattttgtgggagttgtggtggggtttaggagagtttgtttaagagggtgtgtaggtgggtggtagagttggagtaaggtattagttttaatagataggagtttgaggttggtagaagtgggggttttggtttaaggtgtggggttaatttggttagagttgagtttggtagggttttggtaagattttgtggtttttttgttttggtgaagtatttttttgtttgggtttttatttgtttgtaagtttgttgtggatagtgtgatttttatagatgtatattgtgtttattttatagatggagaaattaaggtttagagaggaagtgatttgtttagagttatggaataggaaagtggtagggtttttatgttttgatttttaggttagtgtttttgttgttttattgaggtttttgggaattataggttttgtgtgttttttttagttttttaggggttgttgaatagtttttaagtggtgttggattattgaagatgtttttgtttattgtttttttaggttttagggttatgggttatgttttttttttttttgggtagattttggttttggttttgtttggtatttgtgatttagtttttttttgatttttttgggtttgttggattggaagggtatttgtgtagttttttttgggtttttattatttattgatagatagtgttggtggagagaagggttttagtggtgatgtattgggtttgataattagaaattttggtggtatttgttgagtattttttatgtgtttttttttttgttgggattttaggattgaaatttaggttatatttttatagatgttttggtatttttaaggtaattttgaaaggaaagtatgttgatgaattaagtaattgtttgtttaattttttatgttatttttgaatttaagttttattgttgattattgggagtaggagttagtatgtttattgatagataagtaaattgaggtaaagaggttagatagttaggtatggtggtatatgtttgtaattttagttatttaggaggttggagtaggaggattatttgaatttaggagtttgagattagtttgggtaatatagtaagattttgtttttttaaaaaataagatgaataatatatttttaaaaagagatttgataaattatgtaggattatagagttaataaatggtgatattatggtttgtaagtttttttttagtttttggttattttttgtttttttggtattggtttttttggaattttttttaggtaggtggatgggaaaagaagtgaagatataggttggtagttggtgttgtgatttggagttttgtttttggtgttaagttgggttttagttgaaggagatttgttggaggggttttttttgtgttttttggggagtaaagatggttttggagatggagatatggtttgttagttttaagttattttaaaggtggggttggtgggttaggagttagttttggtttttttgttatgttgtgtgtggttttgttttgttattttatttgttggaggatttttttgatgttttttagtgggttttaatattttgtgattaggattttgtatgaggtagagggagggtaggagttggagtttagtaaggattttaagtttagggataggttttatttgttatatttgttaagttgtgagggttttaggtgtttgggaggagggagtaggagtggaagtattagtttgagttgttaaattaggttatgtattatttgttattttttgttggtagaaggagattatagatattagaagatagtagtttttgttagaattgggtttttttatgatttttaggtggtgattttgaattttagaaaaagtgttttggggagagtggagtgaaggaagagtgtgaatattggatttgattttattttagtttttgtgttgtagttagtagggtgagtttaggatagttggtagttgtttgggtttagtttttttttttgtgaatgaaggtggtggggagtgtatgtgtgtgtgtgagtgtgtgtgagtataaatgattgtggatgtgagagtttatgaaagtgagaatgtattagtgtgtaagaaagtgtgagtatgtgagaatgagtgtgtttgtgagaatgtatgtatgtgtgagtataagtgtgtgaatgtgagaatgtttgagtgtgagaatgaaagtttgtaagtgtgttagtgtgagggaatgtgtgagtgtatttgagagtgtgtgtgtgtgtgtgtgtgtgtgtgtatgtatgtattagattaaataagaatgtatttaattgatattttttggatattgttatttattaggaattattaaaattagttattttagaggagggtggatgttgtattaggggatatttggtaatgtttgtagatttttttgttggttgtagtgtggggtgtatgttgtgggtatgtggtgggtagaggttagggatgttgttgagtttttttttgtgtttagggtagtttttaaggtagaggttgtttgtggggtttaaatgttagtagtgttgagttgaggatttttgtttaggaggtatagatgttgttttggatgttgtttagatagtatttgttttgttttttagggggatagatagatagtggatatagtttagatgtagtttgatgagtgagtttaagggagtgtttgtttttttgggattgtgagttttgtgggggtaggaattgggtttgtttgtttatgatttttagatgagttttatagttagttttattattatagttggtgttatttttgttttgagttttgtgttgggtatatagaatttagtgggtagaaatttttgaataaattttgagttttttattttgtttttgtgaatttagatgttttttgagggttagtttggtggtgtgggggttgggagtgggtagattgtagggagttaagttttggggtggagtggggtttaggtttttttttttggtttgagttgaagtattttggttttttaaattttaaaatttttattttttaatatttttatatgttgaatttttttatatgattttttttggataaaagtttttgtaaaaaaagtttgaaaagttttttggttgaggtattagggataaggtaagggttgtttgatgggtttaatttgggagaattgaggtgagggagttgttttttttttattttataggttggttagatggtggattgttagtagttggttgggttaatttgtagagagtattttttgtagtttttggtttatgtggttttagtattgtaggatgtgattaatatgtaggttattttgaggtttgtagtttttatagtttttttagattagtgtaaagttttatttagttttttggtagattttagagtttaggatattttttaaatggtttaaaattaatggaattatttgggggataataaataatgttattagatattgttaaatgttttttgggagagaaaattttttttagtttagatatattttgtgattatttttagtagttttatttttggattttttaaaggtttttagtagtgagggggttgggttagagaaggttttattagtttttaaaagtagatgtttaagaatttgatatttttaggatatatagtgatttttttaatttattgttttatgtggtttgggaagttaagttgtaggaataaaaaaggtgttgggtagggtaaagaggttttattagatagaggaaatggggaaggtggatatttttgttttttttgttttggagaatgagagagttggtggagattgatagatattatgttttaatgtgattatggtttttggaagttaaagagaattgattaaattgggttgaattatagtattttttgagtttttttaaatgtagaatttgttttttagatattgtatttttggggtttagtaatgatttaaaagtgaattttattgaaagtatgttgttgagttatattgtttatttatttagagagggagttgtagtttgattttttgtttaggagagttttttgtgttgggagttagaggtagagaaaagaataagttatttgtttgatgaagtttatagataggattgtttgaatttatttggtgggatagtgagagttttttgattttattttggtgtgttttgttgagtagggtatgttaagaagtttttgtgaaatgagaagtttttttatttttagaatgaggggtggtgttggtagggttttgggtttttggaaggttttttaggttatgtaggtgaggtgttttataggttagggttttgggattatgaatttgttgaattagtaaggttaatagatgtgggttttttatgttttttgtttttaagttggtagttgtttaggaatgtttataaatataaaattgattttgtttttagaatgttttggagtatagattttaaagtttgtataaagttatttttgtggggttggttatttattggggaaaattatgttggggttttagattagagtattttagtggagagtaggatttgtttatggaatgttatgtgttggtataagggatggatttggggtggatttggggtggtttgtatttgttggttgatttttaagaggtgttttattaggtttttgggagtttttgggtttttagaggagttttaggtaggaattttagaggtttgtatttttttgattattgtatttgaggggttttgggtagtgtggggtttaggtttttattttgaagttggttgtgtgagggttttggttaggtgttttttatttagaaagtttggatttgtgaattgggtgggtggtttgggttttttttttttgttatttattttttttttgttggttttttgttgttgtttgtaagatttgattttattttgtattttttatgttttattttagggattgatgggtatttagtttttttaatttgattattgatttagaagaatatatgtttatatttttggtttttagatttagtttttggaggtatgtttaatagatagtattatttgtttaagttttgtattttagggagttagtggtagtattttaagtttttttgggttgtgttttagtttggttttgtagtttatatttttgtatttgttttgtgttagagtataggtaatttttttggtttattttttgttttgatttaggaagtgttttttgttttggaggtttttttttttataaaattgtattgtgtgtttaaatgtttgttaaattttttgatttaaggtttttttttgtttttttttttttttagtaggtagttgagagttttgtattgtggggtgtgtatgtgtgtttatgtgtatgtgtgtgtttgtgtgtttgtgtgtttgtattattaattttttgttagggttaattgtgaggttgaagtttgtattatgtttatatgtggtaagtattgtgtgagtttgtgttttttttttattgttatatgggggttgtttgattttgggattagtaatgtaggtttttttttagaatgtagtgagttgtattttgggtatggtgggtgggtttgaatttggtatggggatttgtttgtgaggttgatttatttattttattgggagggtggtgtttgtgagttttagtatttttttttaggaaatttattgtgttggttttaatgggaagattgggttgggtttatgggttgtgtgtataagggatttttttattttttgtagtgtattatgagggaggtgaagttgttgggtagagtgtaggtttggtttttttgttattggttttggatttgttttttttaggaaattttttagtaggaagtgttgattttttggtttttgtttttttgtagg

SEQ ID NO: 360 - DNA, 17897 bp, Artificial Sequence
  chemically treated genomic DNA (Homo sapiens)
tttgtaaggagataaaggttaaaaggttaatattttttgttgagaggttttttaaaggaagtaaatttaagattaatggtaagaaggttaggtttgtgttttgtttagtagttttattttttttgtgatgtattgtaggggatgaggaggttttttgtatatatagtttatggatttaatttagtttttttattggggttagtgtagtggattttttgggagaggatattgaggtttatagatattatttttttaatgaaatggatagattagttttataaataggtttttatattaagtttaggtttatttattatatttaggatgtagtttattgtattttagaaggggatttgtattgttgattttaaagttaggtagtttttgtgtgataatgaaaggggaatataagtttatatgatgtttattatgtataggtatagtgtaagttttagttttatagttagttttaatagaaggttggtgatgtagatgtatagatatataggtatatgtatgtgtgtgaatatatatatatattttatggtgtaggatttttggttgtttgttaaaagggaagaggggtagaggaaaattttaagttaaggagtttggtaggtatttgaatgtatagtataattttgtaagaaaaaagatttttaaggtagaaagtattttttggattaaagtaggggatggattagaggggttatttgtgttttaatatagggtaggtgtagaagtgtgggttgtaaaattagattgaagtatagtttaggaagatttggaatgttgttattgattttttggggtgtaaggtttgggtaggtggtgttatttattaagtatgtttttaagagttgaatttagaaattagaagtataagtatgtatttttttagattagtagttaagttagaaaaattaaatgtttattaatttttggggtgaagtataaaaaatgtagaataaggttaagttttatagatagtagtagaggattggtggagaagaagtaagtgataagagggaagagtttaggttatttatttagtttatagatttagattttttgaatggaaaatgtttgattaaagtttttatatagttagttttagagtgggaatttgggttttgtattgtttaaggttttttggatgtaatggttgagagaatgtaagtttttgaaatttttgtttagggtttttttgaagatttaggaatttttaagaatttggtgaaatattttttagaggttagttggtaagtgtgggttattttgaatttattttgggtttattttttgtgttaatatatggtattttgtgggtagattttgttttttattggggtgttttggtttggggttttagtatgattttttttagtagataattagttttataagaatggttttatatagattttggagtttatgttttagaatattttgaaaataaagttggttttatatttgtgagtatttttgggtagttgttagtttggaggtaggaggtatgaaaggtttgtgtttgttagttttgttaatttagtaggtttgtggttttaagattttggtttgtgggatattttgtttatatggtttagggagttttttagaaatttagggttttgttaatgttattttttattttgggagtgaaaggattttttattttataggagttttttagtatattttgtttagtaaagtgtgttagggtgaagttagggggtttttattgttttattaggtgggtttaagtagttttatttgtgagttttattaagtaggtagtttgtttttttttttatttttagtttttagtatgagagatttttttaggtagaaagttaggttgtaattttttttttgaataaatgagtaatgtagtttaatagtatgtttttagtaaaatttatttttaaattattgttaaattttaagagtgtaatgtttggaaaataaattttatatttaaaaggatttgagaaatgttgtggtttagtttagtttggttagttttttttggtttttagaaattgtgattatattaggatatagtgtttgttagtttttattagtttttttgttttttagaatagaaaagatagaaatgtttattttttttgttttttttatttggtgaaatttttttattttatttggtattttttttatttttatagtttagttttttagattatatgaggtaatgggttaaaaaaattgttgtgtgttttagaaatattaagtttttgagtatttgtttttgggagttggtggggttttttttgatttagtttttttattgttaaaggtttttgggaagtttagagataaaattgttgaggatgattatggggtatatttaaattaggggggatttttttttttaggggatatttggtaatgtttagtgatattatttattgttttttaaatgattttattgattttgaattatttaggaagtgttttagattttgaagtttgttgggagattggataaagttttgtattagtttggggggattgtgggggttgtaggttttggggtagtttgtatgttggttgtgttttgtaatattaaggttgtatgaattaaggattgtagaaggtgttttttgtaggttgatttagttagttgttggtggtttattatttggttagtttgtagggtgggaggagagtggtttttttattttagtttttttgagttgggtttattaagtagtttttattttgtttttgatgttttaattaaaaaattttttaaattttttttgtaggagtttttatttaaaggaaattatgtaaggaagtttaatatataaaaatgttaaaaaataaaaattttaaaatttaaaaagttaaggtgttttggtttaagttagggaaaggggtttgaattttattttattttaggatttggttttttataatttgtttatttttagtttttatgttattaggttggtttttaaagaatatttgagtttatggaagtaggatggaaaatttaggatttatttagaggtttttatttattaggttttatgtgtttaatatagagtttagaataaaaataatattagttatggtgatgagattggttatgggatttatttggggattatgagtaaatagatttagtttttgtttttatggagtttatagttttgaggggataggtatttttttgggtttatttattaggttgtatttgggttgtgtttattgtttgtttgtttttttggagggtagagtagatgttgtttggatagtatttaggatagtgtttgtgttttttggatagagatttttagtttagtattgttgatatttgggttttataagtagtttttgttttaggggttgttttgagtatgggaggaggtttagtagtatttttggtttttgtttattatatgtttatagtatatattttatgttgtgattagtaaaagaatttgtaaatgttgttaaatgttttttggtgtgatatttatttttttttggaatagttgattttagtaatttttagtaggtaatagtatttagaaaatgttagttggatgtatttttatttaatttagtgtatgtgtgtatatatgtatatatatatatatatatttttaaatgtatttatatatttttttatattgatatatttgtaaatttttatttttatatttagatatttttatatttatatatttatatttatatatatatatatttttataaatatatttatttttatatatttatatttttttatatattgatatatttttatttttatggatttttatatttatagttatttatatttatatgtatttatatgtatatgtgtattttttattatttttatttatggaggagggggttgggtttaagtggttgttagttgttttgagtttattttgttggttgtagtataggggttggagtggagttagatttaatgtttatattttttttttattttattttttttaaaatattttttttgggatttaaagttattatttgagaattatggaaggatttagttttggtagaagttgttgttttttggtgtttgtgatttttttttgttagtaggaaatggtaggtgatatgtgatttggtttggtggtttgagttggtgtttttatttttgttttttttttttgggtatttgaggtttttatggtttagtaagtgtggtaggtggagtttgtttttgggtttgaggtttttgttggattttagtttttgttttttttttgttttatgtaaagttttaattatagaatgttgggatttattagaaagtattaaagaggttttttagtaggtggggtggtaaggtagggttatatatagtatggtgggggaattagggttgatttttagtttattagttttatttttggagtggtttgggattgataaattgtgtttttatttttaaggttatttttgttttttaagaagtatagaagaaatttttttagtaggttttttttagttaaaatttagtttagtattaaaaatagggttttaggttatagtattagttgttagtttgtatttttatttttttttttatttatttgtttgggaggaattttgagaagattaatgttagagaagtgaaaggtagttaggagttgggggaaggtttgtaggttatggtgttattatttattagttttgtgattttgtataatttattgaatttttttttaaaaatgtattatttattttgttttttagagagatagggttttgttatgttgtttagattggttttaaatttttgggtttaagtgatttttttattttggttttttgagtagttgagattataggtatatgttattatgtttggttatttaatttttttgttttagtttgtttgtttgttaatgggtatgttaatttttgtttttaatgattagtagtggggtttaaatttaagaatggtatggagaattaagtaaatagttgtttaatttattaatatattttttttttagggttgttttggagatgttaggatatttgtgaggatgtggtttgggttttagttttagagttttagtgaggagagggatatatggaaaatgtttagtaaatgttattaaggtttttgattattaggtttagtgtgttattattggggtttttttttttattagtattgtttgttaatgagtaatgagggtttaagaggggttatataaatatttttttagtttagtagatttaggagagttagaggagagttggattataggtgttaggtaaagttaaggttaggatttgtttgaggaagaaaagaatgtgatttgtgattttgggatttgggagggtagtgggtagaggtatttttagtaatttgatattatttgagaattgtttaatagtttttgggggattgagggggatatatagagtttgtgatttttaaaaattttagtggggtagtaggaatgttggtttaggaattagggtatggggattttgttatttttttattttatgattttgagtaagttattttttttttgggttttggtttttttatttgtaaagtaggtatagtgtatgtttatggagattatgttgtttataataaatttataggtaaatggaaatttaggtaggaaggtgttttattaagataaaagggttatagggttttattaaggttttgttaggtttagttttggttagattagttttgtattttggattaaggtttttatttttgttagttttagatttttgtttgttaagattagtgttttgttttagttttgttatttatttgtatatttttttgagtaaatttttttgggttttgttataatttttatagggtgaggttgaaggggtatttagtagagaaatatttatgatttgttttagaagttttaggttttgtttattaggaagagtagttataggaaggtaataatgtaattttatatagatatattataaaaatagtattaggaatagtatttgtggtattaattggattttaaatttggtattttttttaagttttatagaaattttaggagggaggtgttagtatgttattatttaatagatggggaaattgaggtattaagaggttaagatgtgtgttttaagttagtaagtattaagttggttgttttaaggttaaagtaattttaaagggaatgttgataatgattttatattgttttaaatatatttatagtttttattattatttgtggtttagatataatgttgtaaggtgggttgtatgtgattatgaggtttttagtgtgtggaggttagttgggatagttatatgttttttttttattttgtagttattattgagttattatgagtaggtttgagtttttggtaaaattagtattttgaatttttttttttttataatatttagaaggttttttgtttttagtttttttatagtatttttttaagatggttaatttaatgttttggaaaagtatttatttagtatattgttttatttgttttttaaggaggttgttttgggagaggttgggtattatatttagtttataaatgggtaatttgaggtttaaaaataaatataaaggtttatttgatttttaaaggttatatgtttagatttttttttattgagggaaaggtgaaaaatttattggtttgttgtgggtgtaggtgtggtatttatttttttgggggagggtggataatagttttttggaggtttttagtgaagtagataaagggagagtaggtgggaattgttgataagggtagtattgattgttattaatagtaattggtttagattttattttttgtaatatgtttggttttaaggttatatgaaagttagtgttttttttagtatattgtgttttttatagaatagatttttaaaaggagggaaaaaattaatatgtgttgtggttgtttgttgtagtaatttttttagaaaattgttgagaatagtattatttttgtttgaattttaaggaaaattattttgagataggttttggatagttttgttttattgtggatataattttttgttatttttttgtttaaagagattttgaagttaagttataaagtagtttatgggtttttttggtgttttttggtttttttgaaatttaaggttttggggagggtgaggaagttggtagtttttatgaattgttttttttaattaattaatttagtaaataatatgggtggatttattggatttttaagaaagttttttagtttagaggttagggaattgtattagagtaattagaattaaggaaatagtataaatgttagagaataaaattatagtaggaattttttgagggtttttgtattttgtagtggagtttgaaatttaggaggtattagtgatgtttgatatttaaggaatgaaaaagggattattaagaaggtgaattttattgttttttttttaaataagttaaagttgtatttattttttgggtgtgggtttagaggggttggagttgaaattgaattgttgtgtgtttaatttgagtatagtattagggaggttagtaagagtgttttaaatataatagtaggaagagggaggtgttaggaattttgttagggtttattttttttttgtaatataattgagatttttttggagatttttagtggagttttggtagtatgagtaatttgtttggtagatagaagatgattgtttgaggggatgaggtgaataattggaagtttaaaggaggatattggtttttttagaggattattttgtgaaattgtaagataggtatgagttgtgttggatggtttgagataatttgtggaaattatataaatggagttagtgttagtagaggatgaggaaatggtttttttatatagaattttttgttttgagatgggatgttagttatgttaataggatttttttttagaatggttttgtagtttttattttttggaatgggtttttgattttgtttatgtaagatggtttaagttatttttttaattagtggagatgttttttttattattattaatataatatttattaaggataggtttttaggttttatgggagatatggataggttttaggaaggatttaatttagttttttttttagtagaggatagttaaggaggtttttttggagaaaggaggagagttttatgattaaaaaggaggaaggagagatggtaagtatttttagttgagagaggttatagatttattttttaaatggtttttttatatttatatttgaagagggttatttggaatttttttaggttttgtgggggtggggtagagggtgaaggtaggagaataaggtggagatttgggtttttatttatttttttttaaatagaattttatgtagatttaaaatgtatagttgtagaaagtttttttatagatttaaagaaaggaaagattaaattgttggggagggtatttaaggtttttagattgttaaggagttttattttttattagtttagttgtaagaaaatttgttggatttaaaaggttagagatggagtttaggtaggtagggtataggtaggtttgtaaataatgttaggtgggaaagttaaagatttgggttaaagagatttgtttatggttttgattgtgtaatttatttttattttgtagtgttggggtttatgttttatttgagggagtttaggtttttttttatatggtttttattttgagaatatggttttaggttggtatttatttatggttttttatttttgtagttgtttttttgtggggttttagtgtttttagtttttttgtttatttgtttgggttaagtttttagttaagattgttatttagtttgtttttatttttaagttgaaagataaaaagtaagtggatatgtggtatttttattatatagttattaagggaggtaggaataatagtttggggtggatttaggaaataagtttttttttaaaaggtgggtttagagggtgtgggtggtttttaagtgtaatgttggagggtggaaagggtttaggaggtttattttgggtagaattttatttattggattttggatagaagagttattagtttgagttttaattttttgatttgagaggtggaaagaatgttttttattttagttagttgatgtgatgtattgaatttttaaggtattatagtaaataagagttatttattgagtatttattaattttttggtattgtggatatagggtggtttgaaggtatagtggtatgtatgattatattttttttttttttttttttgttattttagagtagaggtttttaattttgtttgtttgtaggatattttatttttaatttagttaaaggagttttgaaataatagtatattttttgatggagagagaattgtaggagattgggtttggaaatgtgtattttagataagatttttatgatattattatgtaatttatataagtttagtaaaaagtaatatttaggttaagtatttgtaggtatttttatagttttgggtaggtttaggataaagggttttagattttgtttgttaagaagatgttttgagaatgttttttgtgggtgttattgatggtaaatatttatatgttgttttttatatgtttagtgttgtttttaggttatatagattaatatttatatattttgatggtattatgtttgttatttttattttatagaaaagtaaattgaggtatggagtttttgattgtttttttatttgagtttgatttttttaggtgttttaatatgttgttatggaaaaaaaataaaggttttgaagtttaattgtttgggtttaaagtttggtttttttatttgagttatatggtaataggtaaattttgaaatttttttggttttagttgttttatttatttaatggagtaatatgatttaggtaatgtttttgtgaggatgaaggtagatggagggagatagtggttgttttggagggagagagatgttgtgtttttttttggttttttttttaggttgagttaaatttgaattttgtttgagttttagatgttgagttattatgtttttttttttaggataaggtttttgagttatatttggaatgggattttttggggttgggttttaaggaagaattgtagttttgggttatttgaaaaatataatgttattttttttttaggtttatgaggaggtaagtttaggttagtggattttaatgtaatttaggggggtttttagtttagttgagatttgttttttgttatggggggggggtagttttatttagttaaaggttaatttagggggttgtagtttttaagtttttgttttttaggttggttttgttaattttttaagaatatttgatttatatttaaaaaaaattattttgttttgtttttttggttttaaaagtttttttattagaaatttaatgaagatgtaatttttttttgtttttttatagtaggtaggtaaaattttgttaggaattttttttattgtttttagttttatttaggagttttttataaagttgagttttagtttagtttggtttgggtatatttttttttatttttgtgttttattttttatttgtaaaatggaaagaagttggattaggtaggttttgtgtgagttttttattttattttaaatgattaaattttgttgttttaaaagaatttttttataagagatttaaatagatattttaggattttttaaaagtaaaagttaatatttttatttatgtatagtttattattttgtttgaaatttaatttgttggtttataggagaatggggtagaagatttagagttatttattttattttatgtgtatattttaattttttttatttgttaggtgttgggttaggggttaggttatagggtagggtaggtaaatttttttttttgtttagatgtagtgggagatatggttttataaagttaagaagttataggttaggggaatatttagttttttatttatattaaaatttttttttttttttatatttttttttatttttgatattgtgttattttagtttggggttggttttgttgttatatatattatatagaattggtttgtgtttttagttgtgtgttttttttattagaaggtagtttttttaagaaaggtgttggggtttgttttttttgtattttgtttattttaattatatttgtgaaatttaataagaatgttagaattttttaataggaagagtttagattgaaaaatttgttttgaaattatatttttgtagtaagaatagggggtttgtatttagatatgtttttttgaggtagtttaggagaaggttttgtgtagttgatgggtattataaggatgtttattgtttttttgtttggttattggttgatttttgaatattagatattttttagtagtttaaagaaattaaataaattgaagtgtttttagtgtttgtgaggaaggggtgtttttggatgggtataagataattaagggttttgttttttttatttattgttaggtattttttatttttaagttatagaggtgtgttgtttaggatttttagggatagtagggataataggtgggggatatgggggaggggtgggtaaggaattgatttattaaattttagttttagttattaatttgatagaggtgtgatagtgtgttttttttagaattagttgtattttttaagtttagtttgaaatttttttttgaggttgaattagagattgtggtggattttttaggaatgttgaagtaattttagttgtttttttttgtggagggtaggagtggttagtattagaggtaggggaggggaggaaagtgggggagggtgggtggaggtgaaaatgatgttatttttagttttagttagtttaaggggttgttaaatgtttgtgagattttttttgtttaggttattttttttatgttgttgatgtgttaattttgggtttttttgggggtgtattttgtttagtggtgtttgtagatatttgttttggtttgtgtgttgtattgtgatatattttggattttttttttatatatatgtttatatttatatatgtatattgttttgtgtgtgttatgggattgaagtgttattagttttttggatttatatttgtttttgatttagtttgtaagttagatatatttatgtttttttttttagtttttttgttagtgttatttatttttattaattttttatttatatatttgtgtgtaatttttttgtttttagatatagatatatatatatatatatatatatatatatatatatatttatttagttttttttgtatttatgtttagtgtgtatttttgttagtggtgttagttgggatttggagatgatgttaggaaatgttattttggtatttttttggattgttttattgttttttttttgatttttagaattttaatttttagttaggggggagatgaatgggattttgttttttttttttttttttttgtaattgaattttttattttagtggtgtttgtatttaaagtttttttgtgtttgtgttttggggtgattgtgtatttgtagttttggggtgtttatttttggagtatgtggggttataaagggtggttttggtgttttagtggtattgtatgggtggtttttttttgttttgtgttgtgtttgggagaagagggtgtgggtttatttaatgtgagggagaaaggaaaggatggtgttgaggttggtggtttagtgttttgtggaagttgagggtggatggtgaattgatgagttttagtattagttgggagttaggtgaggtttgtttatgtttgggtggagggtgattttataggtgttgtggttttgtttttgtgttttgttttttttagatttttgtagttttagtatgtagttgggatatattttttttttgttttttgttttttttttttgggtgtgttgggttgggttgggttttggtagtgtgtggtgggtgtttattggagttgttgtttgttgtgtaagtagttgtaggggtgtggttgggaggggtattggggtttgggttgtgggttggttttgtagttttttttgagtttagggttttggtttgtgtagtgggtgtgtgtgttttgtttggaggaggtgtttgtgtgtttgtgtgtgtttatgtgtgtgtttgtgtgtgtgtatgtggatttttttgtgtttttgtatgggtggaggttttttatttttgttttagagttttttttaagagttttgttgtgttatgttttgagtgattttttttattttttgtaggttttattagtttggttttttagttggatttggttgtttgtttagtagttgtttttgtttttgtttgataggttttttttgatttttagttttttgtgttgttaaagtttttgttgaaatttttgtttttgtttaattttgtttattttgtttattgttgtttagtgtttatttttttttttatttttttagttttaagtatatttattggattttgtttattgggttttttttttttgttttataagtttagatgagaggatttttatttttttttattttgattttttgaatttttatgatttattttttttaattttagtattgttttgttttgttgttttgtttgtgtgtaattattggtttgtatgtttttatttggttaaagaaattagtaatttttaatttttattgtatatgagaagttttagaggagttgttaaattaaaaaataaataaatagatagataataaaaagagagagatggattttagaatagtttaattagaattttagggggtgtaaattaattgggtattggggtttttataaagttatttaggtggtttttgatgtgtagttaggttgagaagtattgtatggaggaatatgattttatgaataaaggaagtttgatttatagttggtattgttattgtttttaggttatttgtttagtgttgaatttgttattgagtttaggattagatttagggtaagtttaggtgattttttttgtgtttttatagatatatatgtgtgtatgtataatattttttgttgaattgtaaattttttttttgtgttaatttatgttgtttttaaggtaggggttatggtttttttttttgattattagggttagttttggagaagggttttttggaataaaagaaatatggagaggggtaaatagtatttttaggatttaggatatttgtgttttaggtttgtttttgatattattgattataaattaataaatttgggttttagaatttttattggtaaagggagaggattagatttaatgattttttagaatttatttagtgttaaagttttgttattttattataaatgattagtgtgaagaatagagttttagtgttatgggttttgttgttagaagagtttggttaaattataaagtttggttattagttatgaagtttggttaaattataaagtttggttatatttaagaatgttttgaatgtaggagtatatttttttattttagaaaatttaatatttagaattaataagtgaatgaatgattattgggtagttttttattttttatggatttgaattagtttaattgtagtatttttagtgagggaaaattttttttattttaaataaaatgttgtgtttaggtagagtggtttatatttgtaattttagtattttgggaggttaatgtagaagttttttttgagtttaggagtttgagattagtttttataatatagtgatgttttatttttataaaaaagatgaaagttagttaggtttggtggtaagtatttgtagttttagttattttagaggtagaggtgggaggattgtttgagtttaggagttttagaaaagtttgagtaatataatgagatattatttttataagaaaataaaaaattaggtgggtttagtggtatgtagttgtagttttagttatttgggaggttaaggtaggagttttgtttttttaggttttgaaatttatttattttgttattttataaatgatagaattgagttgtttttatgagttgggttttgtattttgttattgggaaaggattgaaaaggtaaaaatattttttataggtgtatagtatggtatagttttaagatgtagtttttttatttatatagtgtggttgagatgaatttatttattttttaattatattaaggatttattatgtttaggtattattttagattttggggatatgattatgaataatagtaataataaaagtgtatttttgggagttattttgttgtttaaagatttttttagattaagtagtttgtgtgtttgttattttttagttagtttatatatatttatttttttataggttttttattgtggtgatttattgagtgagtatttttggttttttatttgttaaagatataagagtgttaagtttaaaagtgtggagtgttaagataaggaatgttaagtttaaaggtgtagggaaggtggtttatttttttagtaataaatggaattagtgtatggaattagaagggtattttgttaggggaggtttttgtttgtttttttgaggaggtttttaggatagaatgtgaagagtagtttagatttgtagtttgaaattttgaggaggttgtttggtaggaggttgggtttgtgtgggaagtttaattttttggaagattattagtattgaataggttagaagatagaggaaggagagtggagtgaagagaaaagagtagagaagggaggtaagaatttgagtaatggaatataattttttaagtgatggtattttaaaattagagtttatattattttggagaaggtttgaggaagatattatttggattttatattttttttttttagtttaatatagttaattttttttttttgttgaaaaggatgtttttttttgttgagtattagatgaagtagtttttttagttaagtgttatgttgtaggagaaagattgtttttagtataggtttggatgtatataaagtatagaggatgtttattttatatagaggttttttattgggatttgggagttgtatgtatttttatattttttattgtagttagttgaggtggtagaagtttatggagttgaatgtgggtgtaattgtattgattgtttatattattttttttttttgttggttagtagtagaattagatttgtttagtaaatgtatatgtgttgtaaatttgttataggatgagattggattttttggattaatgtttattggaaatttttatttaataataatttagattttatattagaatattttaattaaatgttttaaaaatgattataggaattatttgtttttaattgttttttttaaaatttatgggtatttggggttgggagagattaagatgtagtagggatttatggagaagaatttggtggtttgtggtttttagttttaattttattatttatgagttgtagtatttggggtaaattattttatttttttgtgtatggaggaaatgagtgagagaaattattagattttttaattataatttatgggtttattgttgtagattattattttttttgtttgttaaaatgaaaaagtgtttgtaaaagtgtttttttatttttagttttgggtttttttgggatttttttttttttttagtatttattttttttttttttttggattaaattaattaataagtaaatatttattgtaattaatgatttattttaaattaatttttttttaattttaagttttttatttttgtattgtagtttaattaataagtaaatatttattgtaattaatgatttattttaattaattttttttgatttttaagttttttatttttgtattgtagtttagttttttttatttttttttttttaaattttttaaaataagtatttgtatttaaaggtttattttatttttttttttttttattttgtagtgattattaagttttttttgaatttggttaaataagtttttaaaatttgttaggaaaaataatagtttttgtttttttatttttttatttttttatttttagaagttattattttttgtttttggagaattatttttattttatttttgttatttgtagattttatgtttttgggtaagttattttattttttttttttgtttttttatgtataagatatatataataatatagggttattgtgataaatatatgtgttaatatatgtaaagtgtttagaatagtttttggtatatagaaggtttttattaaagtgtttatttttatttttattgttattattattattattattattattattattattattattattttgttttattttttttggtattttgtatatttgattgtagagaagtttagtaaatattggttgaagaattgagtaaatgtagatgtttttttttgaatttattttattttatttggttttattgtttggattttgttaggagggaaaaggggattttatttgttttatgattttaggtggagggattgttatttgggatttttatttaagtaaaagtaaattattttagttatttgtaagtatgtttggtttgtaatattatgttgtgagtaatgaaaattaaaaaaaaaaaaaattatgaaaggaaaataattttaaatgagggtgaagggtaggttatgtttaggatgtgtaataaattttttattttgaatataaatgaagagttgtgtaatgt

SEQ ID NO: 361 - DNA, 5987 bp, Artificial Sequence
  chemically treated genomic DNA (Homo sapiens)
tttttaatttgtattattttttttattttaataattttttttaatattttttataaagtagatttattggttatagaatgttttaatttttatttgtttgagaaaattttattttttttttatttttgaaagataattttgtagggtatagaattttaggttgtaggttttttttttttaaagtgaaatattttattttattttttttttttttgtatggtatttgagaagaagttagatgtaatttttattattattatttaaaagattgtttttgtttttttttttttttttttttttttttttttttttttgtatattatattttttatagttgttttatattttttagatattatgttttggtttttttttgtgtttttttttttgatttttagttttagaagtttttatttatatatttgtaattgtagggatttttttttttgttatgtttagtttattaataagtttttatagatattgttgatttttgttttagtgtttttgatttttagtatttttttgattattttttggaattgttatttgtttatttatattattaatttatttttgtgtgttgttttattatagtaattgtagttgttttaattttataggtattgtaattttaatatttttattatatttgatattgattttgatgtttgttttgttttattaagttatgtttttgttttttagtgtgatttttaattttttgttgaaagttaggtatgatgtattgagtgaaagaaatttaatatattgtaatgtgatgataagagtttaggggaagtgaagtattttatagttttatagtaggttttggttttttagtgagtttgtgtttatgaatggtgatttttaataagtgttttttattttattttttttttgtttttaagtgggataagattattgggggggggttagaattgggtattttttttttttaatgtagaagttaaagagagggttggagttgggtatttttttttttttgtatggaaagttagaggtagttaaatttggatatttttttttttttaatttagttaggttgtgataaaaattttgatagtttaggttttaatattataaaataattttttttgagtataggttttattaagaatattatattttgatggagttgagggggagttttttttgatatttattgtgagaattttgtagagttttaggaagtaaaatttataaaagtgtgggagttttttagaattttttttttgtagatttatttgtattgaatttttagaaatttattaattatagtttaggtttttttatttaggtattggtttttatggaggtttttgtttgtgtatttttgttttagtaagttgttttttttgtatggtttgttttttaaattttttaagtagggttatgatttgttgttttatttttttgatagttttgagagtgttgattttttagtttgtttagatttttatttgtttttaggatgaagtgataatttttaagtttttttttgatatgttagattagaaattgaaagttttaagttttatattttgtgtgtgggtatgtttatattttgtttgttttagtgtttttattttatatttttttttttttttttgtttttttgtgagatttttaggtttaatataaagattgtgtttaatttatttaattattttggtttatttgagtattataatgaataattataaaaaaaaatgaagtaaaagaaaaatttattaaagaattgagatatttgagaaaaagaaaggagattagtgttttataaaatttagaaatagattttttaagtgtttttttattgatttatgtgaaaggattttttttaatttaataaattatgtgtttttgtttatagttttaaaattttttgtgtagttaagaatgggtaaataattaggttttattaaaggattaatgtaaagattttttgtaagtaatatttttgttatttaaggaagagataaattttatggtataattttgttaaagtatattaagaataattttgatataaagttttttttttagttaatatgttatgaaagaaagaagataaggggtgatttttattttttaagtgaattattaaatttattaaagaagaaatgagggaaatagaaagaggatttttgtttgagataatggatttgtatgtatgagtagtagaattttgtttaaagtataaggaagggaaaaaaaagttagtttatttggaattttggatattaagagtttttattgtttatttttttttaatttatatgaatggtttattattttaattaataaatattttatttttttttaatatatttatgaaataaatttgaaatgaatagtgtaatatgtgaatgtttagaatattataaaattaaatataaaatttgtttggtaatttttttagtattttaggaaaaaagttgataaaattttaagtagtagaagggggtagtaaaatttaatagaaagttttggaagatttttaagatttttttttattttttttttatgtagattattttttaataaattttagatgttaatagaaattttgtataatagatttatatatttgtttaaaatagatatagaaatattgaatatatgtaaatatgagagttataagttttatatgattaaattttttttttatggtatataatagttatagtatttttttatataaaataggtttagtggttttaatttagtttggtatatttaatatatttttatgattagtattttaaatgtatttatttgttttattttattgttttagaattgttagttatttaataaattatgtaatttttttttttatgtttagatttgtatttttttttaaaattttgtttatttttaaagttttagattttttttgaatttttttttttgattttttaagtatatggaattttttattttattttgttatataagtgatagaatttttattatgggatagatggagtttaatttttttgagtttaaaataatttaaatataattattttttatgttttgttttttttttatttttgtatttaaatttttttttagataatagaataattaatgtttgataaggaagataatgatgatgattattttaaaatgaatttaggattgtaatgtaaaattttagtatttttttatagtatggattttaatatggtttttaatttaaattaatattagtagttttaattataaattttaaattttagtagatgtaatttatttttttaaaatgaaatagaagattgaaattattaaattattaaaaagaaaatgatttatgtttttagttgaaattttatgtaagattttatgtaataaataggagtgttataaatggaatgatgaaatatgattagaggaggagaaaggttttttagatgagatggaattttagttatttgtgttttatgaagaattagatgtgtatattaagtaaaatagttaaaaaaaaaatttttaagtgagttttttatttattttttttttataagatttttataaattgaggtatttggtgtagttttattttaggttttatgttgttatttttttgtaatgttaaggatttaggatataattgaattttttattttttattttttttttggtgtgtgtgtatatatatatgtatatatatatatatatatatatatatatatattttttagtattttatttttatatgtttttttttgagtattatttatgatagatgttaaataaaagtaaagatgaaattttaattgttaaaattttttttttatttaattaattttttatttaattatgttttaaaatgagaatagaaaattagttttaataagtttaggtaattgaaaagtaaatgttatgttgtattttgatttatggttataatttataattttggaaaagtggatagaaaagataaaagagtgaattttaaaatttgaatttattttattagtattttttatgaagggttagtaattaaaataatttatgtattagggagagaaatgttttaaggtatatgttttggatatttagtgtttttgtaaattttggttattgttgttttttttgtttattagaaggtaggaaattttatattggtgatttgtggagtttatattaattatttatagggtaattgtttaggattagtattatgaggagaatttattttttttgtttttttttttaagaaataaggagggggtgaaggtatggagaatagtattttttttgttgaaagtaatttagttataaagataaattatagttatgtatattgaaggtagttattttattttataaaataagagttttttaaaaagttatgtatgtatgtgttgtatatagagtagatatatagtttattaagtgttgttattaaaatataaaatatgttagttttttttaattttatttgttttagtttgttttgatgtgatttttttgattttttaaagatgtatagattagatatggtggtggtggtgggagaggggattttttgtgtttttggattttagggttgtttagatttttggagaggaagttaagtgtttttttgtttttttttggtattttatttaaggtgattagtttagaattggtttttggaagtgtttgggtaaagattgtgaagaagaaaagatatttggtggaaatttgtgtgtttggggtggtggaatttggggaggagagggagggattagataggagagtggggattattttttttgtttttaaattggggtagttttttgggtttttgatttttttatttttgtgggtaaaaaattttgtttttattgggtttatgtaatttttttaaggggagaggagggaaaaatttgtggggggtatgaaaaggtggaaagaaatagttattttgttatatgggtttggtttttagttttataaaaaggaaggtttttttggttagtgattaattgttatatgatttgtagtgagtgttaggagtatgtttaggaattttttagtagtgttttttttagttttatagttagatgtttttagatagtaaagtttatttttgtgttgtgttttgtttgttgttgtgatgtttgtttgtgttttgttgttgtgtgtggttttggtgtttagttatataggtgagtatttggtgttgtgtattggggattttggttttatgtatttgggtagagtttttgttttgattttttgggtttattttagtattttgatttttttttgaatagagaagttatgtgatttgggaaagagtttggattgttagagtttgaaagaattttgtggatattttagtttttttataagtattgattattatgagttagttatttaattgatttgagatatttttattttttaaatagggatagatgatattaatttgtaggttgttattatgataagataggatttgattaatatatgtgaattgtttatatttggaatttttttattgagtggaagaagttgttttaaatattttagttagtttttttttgtttttaggaaagtttggattatgttttaagataagtaaaatgttttaaaagtaagttgttttattttgaatttttttttaaatgttgattagtgtattagatttattttaatttggaaagtgaagtgttatttatttgaattttttaaaaatgttaattttaatatttaaagagttaattaagaaaagtttagtaatatgatgtattaagttgaatatgttgttatttttatttagaatagaaaattggtatttttatgttttatttattttaaggtaggttaaaaaattgtatttttatgattatttatatattttttgaatttattattgtaaagttgatttatagttaaataattaaatgtttaaattaagattaagatattagagaatgatttatttgttgttttttaattgtagt

SEQ ID NO: 362 - DNA, 5987 bp, Artificial Sequence
  chemically treated genomic DNA (Homo sapiens)
gttgtaattaaaggatagtaaataaattattttttagtgttttaattttaatttaaatatttaattgtttgattatgaattaattttataataataaatttaagaaatatataggtagttatggaaatataattttttaatttgttttagaatggataaaatgtagaaatattaattttttattttaaataaggataatagtatatttaatttggtatattatgttattaagttttttttagttaattttttagatgttaaaattagtatttttaagaagtttaaataagtagtattttattttttaaattaaaatggatttagtatattaattaatatttagggaaaaatttaaagtaaaatagtttatttttaagatattttgtttattttaaaatataatttgggtttttttgggagtaggaaagaattgattagaatatttaaaataattttttttatttaataaaaaggttttaaatataaataatttatatatattgattagattttgttttattataatgataatttgtaaattagtattatttatttttatttaggaggtgagagtgttttagattggttaagtaattggtttataatgattagtgtttgtgggaaagttggaatatttatggagtttttttgaattttagtggtttaagtttttttttaagttatgtagtttttttatttggagagaagttggagtattgggatagatttaggaggttagagtggaaattttgtttgggtgtgtggaattggagtttttggtgtgtggtgttaggtatttatttgtatggttgagtgttaggattgtgtatagtagtagggtgtgggtgagtattgtagtggtgggtagggtgtggtgtgggggtaggttttgttgtttgagggtgtttggttgtggagttgaaggaggtgttgttgaggagtttttggatgtgtttttgatgtttattgtaagttgtatgataattggttgttaattgagagaatttttttttttataagattgaaaattaagtttatgtgatgaaatgattgtttttttttgtttttttgtattttttataaattttttttttttttttttttaaaaaaattgtgtaagtttggtgggggtagggttttttatttatggaaatgagaaaattggaaatttaggaagttgttttaatttgggagtagagggggtagtttttatttttttgtttgattttttttttttttttttgagttttattgttttaggtgtataggtttttgttagatgtttttttttttttgtagtttttgtttgagtgtttttgagagttagttttggattgattgttttggatgggatattgggggagggtagaaggatatttggttttttttttaggaatttgagtggttttgaggtttgggggtgtagggaatttttttttttgttgttgttgttgtgtttggtttgtatgtttttagagggttgaggaagttatgttgggatagattggggtgagtaaggttaagaaaggttgatatgttttatgttttagtgatgatgtttaataggttgtatatttgttttatatgtagtatatatatatatagttttttaaaaaatttttattttgtggaatgaaatagttatttttagtgtatatagttgtaatttatttttgtagttaagttgtttttaatagaagaaatattgttttttgtatttttattttttttttgttttttggaaagagaggtgggaaaggtaaattttttttataatattggttttaagtagttattttgtaaatagttaatgtgagttttatgggttattaatataaagttttttgttttttgatggataaaggaagtggtgatggttagaatttgtagggatgttaaatgtttaaaatgtatgttttaaggtatttttttttttgatgtgtggattattttggttattagttttttataggagatattggtaaaataaatttgagttttaaagtttatttttttgttttttttgtttatttttttaagattatgagttgtgattatggattaaagtataatatagtatttattttttagttgtttgggtttattggggttaattttttatttttgttttggaatatagttggatgaggaattaattagatggaagggagattttgatagttggaattttatttttgtttttgtttaatatttattatgggtagtgtttagggaggagtatgtgagggtgagatattaaaaaatatatatatgtatatgtgtgtgtgtatatatatatatatatatatatatatattagaaaagaagtggaaaatagaaaatttagttatgttttaagtttttagtattataggaaaatgatagtataaaatttgaaataaaattatattaggtattttaatttgtagaagttttataagaaaaaaataaataagagatttatttggaggttttttttttaattgttttgtttagtgtatatatttgattttttatgagatatggatgattaaaattttattttatttaggaagtttttttttttttttagttatattttattattttatttatggtatttttatttattgtatggaattttatatgaaattttaattaagagtgtggattattttttttttgataatttaataattttaattttttgttttattttaaaggagtaggttgtatttattgaaatttgaagtttatagttagagttattaatgttagtttgggttagaagttatgttagaatttatattgtgagagagtattaaaattttatattataattttgaatttattttgaagtgattattattattgttttttttattagatattaattgttttgttgtttgaaaagagatttggatataaaagtgagggaaaaatagggtataaggaataattatatttagattattttaaatttaaaggaattgaattttatttattttatagtggaaattttgttatttatatagtaggatagagtgaagagttttatgtatttggaaagttaaaaaaaaaagtttaaggagaatttgggattttaaggatgggtagagttttagaaagaagtgtaaatttgagtataaggaaaaaagttatataatttattaaataattgataattttgagataataaaataaaatggataggtatatttgggatgttggttatgggagtgtattaaatgtgttaaattaaattaagattattaaatttgttttatatggaaaagtattgtgattattgtgtattataaaaaaaaggtttgattatgtaaaatttatagtttttatgtttgtatatatttaatgtttttgtgtttattttaggtaaatatatggatttgttgtataaaatttttattagtgtttgaaatttgttgggaaataatttatatgaaaagaaaataaggaagaattttaaaaattttttagagttttttgttgagttttattgtttttttttgttgtttgaaattttgttaattttttttttaagatgttaggaagattgttagatagattttgtgtttaattttataatgttttaaatatttatatgttgtattgtttattttagatttgttttatgaatatgttgaaaagaaatgaaatatttattaattgaagtgataagttatttatgtgagttaaaagaaaatgaataataaagatttttaatgtttaaaattttaaataaattaattttttttttttttttttgtattttgagtagggttttattatttatatatatagatttattattttaggtaagggttttttttttattttttttgttttttttttggtgggtttagtggtttatttagagagtggagattattttttgtttttttttttttatggtatgttggttgaaaaaagagttttgtgttagggttatttttagtatattttggtaaggttatgttatgaagtttattttttttttgagtagtagaaatgttatttatagaagatttttatgttagttttttagtaaagtttgattatttatttatttttagttatataagaagttttgaggttataaatgaaagtatataatttgttaaattaagaaaagtttttttatataagttaatgaagaaatatttaaaaaatttatttttaagttttataaaatattgatttttttttttttttttaaatattttaattttttgatggattttttttttattttatttttttttgtgattgtttattataatatttagatgagttaaagtagttgaatgagttgaatatagtttttgtattggatttagaaattttataaggggataaggaagggaaagagagtgtgaggtgggggtattggagtaggtaggatgtgaatatatttatgtatagaatatgaggtttaggatttttagtttttgatttggtatgttagggaggagtttggaaattgttattttattttaaaaataagtaaaaatttaagtaaattgaaaaattaatatttttagaattgttagagaagtgaggtgataggttataattttatttaaaaaatttgaaagatagattatataagaagaataatttattggagtagaaatgtataggtagaaatttttatgaaaattagtatttgggtaggaaaatttgaattgtaattgatgaatttttggaggtttagtgtagataagtttgtaaaggaaaaattttggaagatttttatatttttgtgagttttgttttttggagttttatgaggtttttgtagtgaatattagagaaaatttttttttagttttattagagtatagtgtttttaataaggtttatatttaagagaaattattttataatattagagtttaaattgttgggatttttgttgtagtttaattgaattagaagaaggaaaatatttaaatttaattgtttttagttttttatataggggaagaaaaatatttaattttagttttttttttagtttttatattggagaagggaaatatttaattttagtttttttttagtgattttgttttatttaaggataggaaaagagtggaatgaaaagtatttgttgaaagttattgtttataggtataggtttattaaaaggttgagatttgttataggattatagaatgttttattttttttgaatttttattgttatattataatgtattgagttttttttatttagtatattatgtttggtttttaataaaaaattagaagttatattaaaagataaaaatatagtttgataagatagagtaagtattagaattaatgttaaatatggtagagatgttgaaattataatatttatgaaattaaaataattgtaattattatgataagataatatataagaataggttggtaatgtaagtagatagatggtaattttaagaaataattagagaaatgttagagattaaaaatattggaatagaagttaataatgtttgtaagggtttattagtagattggatatggtagaggaaagaatttttgtgattgtagatatataaatagagatttttaaaattgagaattaaagaaaaaaatatagaagaaaattaaaatataatatttaagaaatatggggtaattataaaaggtgtaatatatagagaaggaaagaagggaaggagaagagagaaaggaatagaagtaattttttaagtaataatgataagaattatatttgatttttttttagatattatataaagaagaaaagagtggaatgaaatattttattttgaggggaaaaaatttataatttagaattttgtattttataaaattattttttaaaagtgaaggagaaataaggtttttttagataaatgaaaattgaggtattttgtggttagtagatttgttttgtgagaaatgttaaaagaagttattgagataagaaaaatgatataggttagaaa

SEQ ID NO: 363 - DNA, 5683 bp, Artificial Sequence
  chemically treated genomic DNA (Homo sapiens)
atggtaaatatttgaaaaagtttttatgttgaaatttaaattagattatatttaggatgttttataaggtggtattttttattaagatgataaaggataaatattggtggagttagagaggttgtttttaaatatagttttttttattagtaatattgtagtagtttgtatttattgtttagagtatgaaaaagatttttgttaaagatggtttttggggatttattattattatatgttaagagtttgttttttatgtttttatttttttattttgttaattttttttatttttattttttggtttagtgtgagattttattattttttttttttatttttttttttttatatttttggttttttagtaggttaatgtttttgtttttttattggaatttatttattttggttatttttttttttatgaatttgttggattatattttaaagttatttaaaagagggatataaagatataataaaattggaaataatgtttatttttattagtttgtagttaagagtgtgtggaattagggtggttgtaggtaaagagatagggggaagggttgttttatgttatgggtaggatagtaaatggtgtaaattttttggaaagtattttagtaatataggtgaagagtttttataatgtgtttattttatgatttatttttattttttttattttaaaggaataagaagaggtttaattaaagtatgagtgaaaaggttatttaaatatagggaaaggggttgttatgatgtttatggttttaagaaatagaaaataataatttggtttaaataataagtatataattaaagaaatttagaagtaggatttttttaagagttgagagatttagtagtttaaaaatgtgatttgatatatgagttttttttatgtttttgtttttttttttttaatattggttttatattaaatttggttttttagtggttaatagtattaaatagtatttattggtatttttgttggtatttaaaagagatggagaaagtttgattttatatggtttttttttaaaagtaataaaggattttttttggaagtttttagtaaattttgttagatttgaattatatgttaatttttaaattagttattggtagggaagtgggaaaaaggggaggaggtgtttatttttaattaatatgtttatttttgtttattgagattaattttataaaagtattgttttagttttttgaagaggagtataatgtttgtgagttatttattatatttatttattaagagttaagggataattgagtaaaatggtagagttggtaggaaaatggtgagtagttttgtttttttgtgttataattgatttgtatataaagagatttggaaatttaaatataagaattttttttttttaagtttagggttttgggtattttaagtttggtttttgtttgggtatagtggtttatgtttgtaattttagtaatttgggaagttaaggagggtggattatttgaggtgatgagtttgagattagtttggttaatatggtgaaattttaattttattaaaaaatataaaaattagttggatgtagtggtatatgtttggaattttagttatttaggaggttgaggtaggaaaattgtttgaatttgggaggtaaaagttgtagtgagttgagattgtattattgtattttagtttgggagatagagtaagattttattttattttttattaaaaaaaaattttggtttttatatgtgaaaaaataaaagttaatttttaaaaattaaataataaagagtgttaggtgataagttttatgatagagataatgtgtgttttaaaatatatagtataaaatagatggaaaatattttatggagaagggagagtttgaattggtgtttgattgaaggataagaaaaatttgttggtaatttttttttggttttgatttttgatgtagttaaagtaaagtaatttagaattatgatttagggaatatatttagagagaaatgaatttatgatgtttttaatttgaagatgttatgattttagattattttagaatataatgattttttattgttttatatttgtaagaaatgttttattattgaaaatttgtaatatttaaaaaatttttatataaaattatagtttattttgttgttttatgttaaataaataaaatatttttttttaattatgttgttttttttaattatatgtaattttaaaattagttgtaattgatagttttttttttatatttattgttaatgtatttaggttaattttatttttaattagagaaatttagaaaaaggaaattttatggtgaaatgttatatgttttataatttttagtaattaatttttaaggatgataatttggtaaaaaagagaattggattagttttttgaaaggtttattattttggtttatgttaattgattgttttaaaattatagtgtttttaggttgtagagatatatttaaaatggattattgtttttatattaaaggggataggtttttttttttttttttttatttttgttttttttaaagttgtatagaggtatatgaggtttggggaatatttgtagtatatgttggttggtaagaatgtgggtgaatttttgttaaggggtgtagatatttttttttttatgattttttttttttatttagaataattgaagtattatgataagaggaagggttttgtgtttgagataagtagtttttatatttgttagttttttttaataagaaagtttttttttgttattgtataggttatttttttattggtaaagtatgatgaagtttggaaattgttgtttttgttttgttgaaagaagttaagttttaagaaatttgtagaggtatttttataattttttagttatggtagtatgaattttgaaggggtagtgagtgttggtttttattttgtttgtatagttaagtttaggggagataatttttttatataagatgtattttgtttttgtgggttttttgtagtttttaagtttttatttgatttgtatataatgatttagtgggttagaggagtttagagttatgagtggtttatttttttaagaattatttttgattgtttagtattatggagtaagtggaaagaagaaaaaaaaaatttaattattttttgaagagtaagatgaatgttgtagaaggagaaggaaggggagggagatggatgggtgttgattttagaatttttagatttgtttggatgaattattatttatgatttgtgggataagaatttgattttatttattaattagtagaaatttttttttttgttttttaatatttgaaatttaataaatatgtgttttaggaatatattggttattttttagaggtattttatatatatattgagtaattagaaaatattttttttgtaatatatatatatatatatatatatatatattattttgttatataatatttttatgtaagaaaagtgaaattgttgtttgatgaatgtaaatatttggttgtttgtagtagttgggagttttgttaggtttaagtgttaagatgggaggtgaattttaggggtttttttttgtttgtgttgagatttttatttggttaagtttttatttatgttttggttttggagtgagtttgatagtgttggattatagtagagggagtgaggtggttgatgttttattttgaagagatgaatggaattttaggaagttagagttatgttggtttgggatagtggtttggagattagattttaatgatagaagtattaggtagtggtatttatggtaatgtgtgtatttatagaaatgtaatttatattttgggtttaggagttgaaaaatgaaaagaatgtttagggaggaaaaagggaaatataataataggtagagagtaatttattattttatgggtttgttttgtaaatagttgaagattttggagttagatggttttgtaaattttttaaataggagttatgttaagaagtatgagtgggtataaaaattgttttttaagatataattttaatttggtttgtggaaattggatatgagtaagtttttttaaaatttgagtagaaagtagttgttttttttgggttttttgatgagaatatgtatattgtttttaagtggttggttgagggagtgttgtggtagtgggagaggtgtttttgtgggttttttggtagttgtggtaggaaagggtttgaaggtagtgaaggtgaatgtggtgtattaatttgttggttttgttgatgttgtgtttatttttttttggggtgggtgtggggttagtttaggataggtgtttgggggatgtgtgtttttattttatggggatggtggaggagagttagtgagggtttgaggggtaggtattttaatgaatggtttttttggtgttttttgtgttttgttggtttatttttttttttataaaatgggtttagtttttagtatttattttttgttattaattaggtattttgggagattagtttgtttgaaagtttttgtgttattttgtgggtttttttaggtggtttttttagttttgtttttttttgggatgtttgttgattattttgagtttgtgtggtgtaagagtatgagtgttgagtttgtgtgtgttaaggttgtgtgggtgggtattgatttttttgagaagttttagtgtttttaagttttgatttttgttttttttattttttagttggaaagttgtgtgttaggtagtggggggtggagagaggagtttagattggtttttattttttgttttttgtttggttgttgtttattggttggaggaatttttaggaatgtgagtgtttttttaaaagtgtgtggtttttttgttttgttagttgttgtgtttgagttggtttgtgagtttagggtttttgttgttttttaggagtaatttttattttggatgtataggtattttttgtgtttttttagtttttgttgtttttgttattgtttttggttgttgtgttttggtatatataggtaagttgtttttggtggttgttgaggattaaagttgtttgggatatttatttggagtgttgaggttttagtttttttggtggattttggaatttatattttttttgtttgtttattttagtttgttttttttagttgttggaggattttttagggtaaggttttagagttattttttttagttttgaggtttataaattaatttattaggatattttaagatttttttattttttgaagttttttttaagtttttgtattagtattttagggaagagtttgtattttttttgttttttttgtaattttaaattatagtttttgattttgtttatttttgattttttaaaagtttttaaattgttggttttgtgttttttatattttaaaattagtattttttttttttattttttttttttttttttttttttttttttatgttttttggaaagtaattttgttgttttttattttagtaaatgtggggttaaagagggatggttttggttttgtttttatgtttagttttgtttttgtgtattgtttttttttgtttagttgatttttgatttttggtttttgtgttttttgttatagg

SEQ ID NO: 364 - DNA, 5683 bp, Artificial Sequence
  chemically treated genomic DNA (Homo sapiens)
tttgtagtaggaagtataagagttgagggttagagattagttaggtagggagggatggtgtgtagaaatggggttgggtatggggatagggttgggattatttttttttgattttgtgtttgttgaaatgaaggataataggattattttttagagagtatgagagagagagagagagagagagagagaggtggaggaaagagatgttggttttaaagtgtggggggtgtaagattaataatttgggggtttttgggaagttgaaggtgagtaagattaggaattgtagtttggggttgtagggagggtaggggaagtatagatttttttttggagtgttgatataaaggtttaaggaggattttagagagtaaggaaattttggggtgttttgatgagttggtttgtgaattttaaggttggagaggatggttttggagttttgttttgaagagttttttagtggttgagaggagtgggttggggtaggtgagtggggagagtgtaggttttggggtttattagagggattgaagttttagtgttttaggtggatgttttgggtagttttggtttttggtggttgttgggggtgatttatttgtgtgtattggagtgtggtggttgggagtggtggtgagggtggtgagggttggaggggtgtggggaatgtttgtgtgtttggagtagaggttgtttttggagagtgataggagttttgaatttgtaggttagtttgggtgtagtggttggtaaggtggaggagttgtgtgtttttaaaggggtgtttgtatttttggggatttttttggttaatgggtggtggttgggtaggaagtgggaggtgggggttagtttgggtttttttttttgttttttgttgtttggtgtgtaattttttagttagaaagtgaagggggtgggggttggggtttgggagtattagaattttttagaaaagttggtgtttgtttatgtagttttggtgtgtatgggtttggtgtttgtatttttgtgttatgtgggtttggggtgattagtaagtattttgaaaagggatggggttggggagattatttaggagggtttgtggggtggtgtaggggtttttgggtgagttgattttttggaatgtttggttgatggtgagaggtggatattagagattgggtttgttttgtaaaaagaaaaatgggttgatggggtgtaggggatattaagagagttatttgttaaagtatttgttttttgggtttttgttgatttttttttattgtttttgtggggtgaggatatgtgttttttgagtgtttgttttgagttggttttatgtttgttttggagggaggtgagtgtggtgttggtggggttggtaggttggtgtgttgtgtttgtttttgttgtttttgggtttttttttgttgtggttgttagggggtttatagagatgttttttttgttgttgtggtgtttttttggttggttgtttgggggtggtgtgtgtatttttattaaggggtttggggaggatagttgttttttatttgaattttaaggaaatttatttgtatttagtttttataagttaaattgaaattgtgttttgaaaaatagtttttgtgtttatttgtgttttttaatgtgatttttgtttggagaatttgtagaattatttggttttagagtttttagttatttatagagtagatttatagagtaataaattattttttgtttattattgtattttttttttttttttttaaatgttttttttattttttggtttttgaatttgaggtgtgggttatatttttgtgggtgtatatattgttatgagtgttgttgtttagtgtttttgttattgaagtttggtttttaagttattgttttaagttagtatgattttagttttttggaattttatttatttttttgggatgggatgttagttgttttgttttttttgttgtgatttagtgttattgggtttgttttgaggttagggtataggtagaagtttgattaaataaggattttagtatgggtagggggaaatttttggggtttattttttattttagtatttaaatttggtaggatttttgattgttgtaaatagttaagtgtttatatttattaaatagtagttttgttttttttgtgtgggagtgttgtatgataagatggtgtgtgtgtgtgtgtgtgtgtgtgtgtattatggaaagagtgttttttagttatttaatatgtatataaaatgtttttaaaagatgattggtatgtttttaaggtatatgtttgttggattttagatgttgggaggtagaaagaaaagtttttattggttgatgaataaaattagatttttgttttgtaaattataggtaatgatttatttaagtagatttgaagattttggaattggtatttatttatttttttttttttttttttttttttatagtatttattttgttttttgaaaagtaattgggtttttttttttttttttttatttgttttatgatattggatagttagaaatagtttttggagggatgggttgtttatggttttgggtttttttggtttattggattattgtgtataaattagatgggggtttgagggttgtaagaggtttataaaagtagaatgtattttgtatgaaaagattattttttttaggtttagttgtgtagatagagtagaaattagtatttattgtttttttaggatttatgttgttatggttgagggattgtaggaatgtttttgtagattttttggaatttggttttttttaataaaataaggataatagtttttaaattttattatgttttattaataagaaggtgatttatatggtggtaggaaagagtttttttattagagaaagttgataggtataggagttgtttattttaaatataaagtttttttttttattatgatattttagttgttttgggtggaaaggaaaggttatagaagagggagtgtttgtgttttttaataggaatttatttatatttttgttagttaatatgtgttgtaaatattttttaaattttatatatttttgtgtagttttgagagaagtagggatgggaaaagggaaaagaaaatttattttttttaatgtgagggtaatagtttattttgagtgtgtttttataatttggaagtattgtgattttaaggtaattaattaatatgggttgaagtgatggattttttagggagttggtttagtttttttttttgttaagttgttatttttgaggattagttattgaaaattgtaaggtatatggtattttattgtaggattttttttttttaagtttttttaattggaggtgggattgatttaaatatattggtagtaagtgtgaggaaagggttgttagttatagttagttttaaaattgtgtgtaattaaggagagtaatataattgagaaaaaatattttgtttatttagtatagaatagtaaggtgggttgtgattttgtgtaggaattttttaagtgttgtaaatttttagtagtggaatattttttataagtgtgaagtaatgaaaaattattgtattttagaatagtttaaaattatagtatttttaaattgaagatattataaatttatttttttttgaatatgttttttagattataattttaagttgttttattttaattgtattagaggttagagttaggaggaagttattaatagattttttttgttttttaattaaatattaatttaagtttttttttttttatgaggtgttttttatttgttttatgttgtgtgttttaaagtatatattatttttattataaaatttattatttaatattttttattatttagtttttaaaaattagtttttatttttttatatgtaaagattagaatttttttttggtggggggtgggatggagttttgttttgttttttaggttggagtgtagtggtataattttagtttattgtaatttttgttttttagatttaagtgatttttttgttttagttttttgagtagttgggattttaggtgtgtgttattatatttaattaatttttgtattttttagtagagttggggttttgttatgttggttaggttggttttaaatttattattttaggtgatttattttttttggttttttaaattgttgagattataggtgtgagttattgtgtttaggtaaggattagatttgaagtgtttaaagttttgggtttgggaagagagagtttttatgtttaaatttttaaatttttttgtgtataagttaattatggtatagaaggatgggattatttattatttttttattagttttattattttatttagttattttttagtttttggtgggtaaatgtggtgagtgatttataaatattgtatttttttttaaagaattgaagtaatatttttatggaattgattttagtgggtaggggtaggtatattggttaagggtaaatattttttttttttttttttatttttttgttagtgattgatttaggaattggtatgtgatttaaatttgatgaggtttgttgaaggtttttgggaaaagttttttgttgtttttaaggaagagttatgtgaaattaggttttttttattttttttggatattaataagaatgttgataagtgttgtttggtgttattggttattggggagttaagtttagtgtgaaattagtgttggaggaggaagaataaaagtatagaaagaatttgtatgttaggttatatttttgagttgttaaattttttaatttttaagggaattttatttttagatttttttggttatgtgtttattatttaagttaagttgttgttttttattttttagaattgtagatattataatggtttttttttttgtgtttggatggtttttttatttatgttttgattaaatttttttttatttttttagaataagagaagtaaggataggttataggataaatatattgtaaaggttttttatttatattattaagatgttttttagaaaatttgtattatttattgttttgtttatggtatgaggtagtttttttttttatttttttgtttgtagttattttagttttatatatttttaattgtaggttggtaagggtgagtgttatttttgattttattgtgtttttgtattttttttttgggtaattttgagatgtagtttagtaggtttataaagaaaagaataattaggatggatggattttagtgaaggggtaggggtattgatttgttaggaaattaagggtatggaggaaagaagatgggaaaaggagatggtgaggttttatattgggttgaaagatggaaatggggaagattagtaaggtaggaaggtgaggatatggagaataggtttttaatatgtaataatgataaatttttaaaagttgtttttggtaaaagttttttttatattttggatgataggtgtaggttattgtagtgttgttgatggggaggattgtatttgggagtagtttttttggttttattaatgtttattttttattattttagtaaaaaatgttattttatggggtattttaaatatggtttggtttgggttttagtgtggaagtttttttaagtgtttgttat

SEQ ID NO: 365 - DNA, 7833 bp, Artificial Sequence
  chemically treated genomic DNA (Homo sapiens)
gtttttggtgagatatgtgttttataagttttaatggagaaaaatgtaagtattttattttttgaaatttggttatttgagtaatgagaaaatagttattttttttaggatagtggtttttaattatggttatgtgtttttttaggaaaattttaaaaatatatatatattaatgtttttgtgttatttttagggattttaagtttttgaatatgaattttgtattagtattttttaattatttaggtgattgtgatgtgaaattatgattgagttttattgttttaagatgaaataaattttttttagtattgaaattataaatttaaattattaaaattaattaagggtatgggaattaataaggtatagggaagtttttatattataaaattatttttttaaattatagtttattgtttatatgttatttgttattgtagaaaagggtgaaaaaatagtaaatttaattatttttagtttgaaaaattatttagaaatgaagatgatgattttgaaatattgttaatattatttgatttataaataatgttttaatatatttattatatattgatagatatttttttatatgaatattatatattaaaattaaggtaataatgtatttagaatattttatttatatttatgtattttaagtaggttagaaattaagatatgagttattaagtatgagatgttaaggtgtggggttagaaattatattgtattttattattaataattaatatatattttaatattatatatatttaattttaatttgtatatttttaattatttttaattatgtgtataaatataagtatatatatttttatgtatttatttatttatatttttatttatttatttatataggggatttttttaaatttattattattaaattatatatttttattttaatttttagaataagtttaggaggtaggtattgttattatttatattttataaatgaggaaattgtttatagttataaagttattgtgttagatatattagaagtttaatatatatttggtgaatatatgtataaaaatagagagatagatatgtataatagtttatttttatattgagtaaaagtttttaatttgttttagaaatttttttgtgaaaattgagtaaaaattgaggtatttttttatttgttatataggtataggtggtattttatttttttaataaggatgaatattgaaatgtggattttaaggtttaattttagattttttgaatttttgatagtgggatttggaatttgtttattgttttaaagttttttaaggaatttatatgattaattaggtttagaaattattggattttattgttgaagtttgagaattaaagtttgggttttattgtggttttatagaaagggtaaatgaagtattatggatagaattgatatgtttttagttagtttttttttttagaagttaataggtagtaatatagtagaaattagtgatttatgttttgtgttttgaagttaggtagaattttatagagttttagtagtgttattgatgagatttgttttttggggtaagttgtttgatgtttttaaagttatattttttttatataaaatgagataatattttttgttttataggggtgttttaaagattaaataaaaataatatgttttattttatatggtataatgtttgatatttaagaagtaaaggatatattttatttttattgaagtaattagaaagtatgaaattatgaaggagataagagttttgattggtagtgtattttatttttttaggtttatttatttattttaaattatttttgttggagaataatttttaagttttttatttaagttgtgagtaattttatattttataatgatgttttttttatgagaaaaaaaaatgtttttaagttttttggagaaaatatatttgtattatttttattgaaaaatttaataattggattttgtttttttgtattaattttagagtgtatatgttataaataaagtgttttagtttaagaagattgaaagtaaatatggtatagtattttaaaataagaattttgtaaatatatggtatgattgtgttatattattagtaattatatgatatgtaatgtaaagtatagtttatagatttaaatttaattttaataagtaaattgattttgttttgttggggaaaagttaaagtattaatttaattgttaatgtagttttgtttatttttttggtatttagtgataagtttaaataatgtatatatttttatttatatatttagtaatataattttttgtttaatgagtgatgtttttttgttatttggtggtgtttgttagttttagaatttgttttttggtggtattataatattaagtatagagtaagtgtaataaaattgtagtatttttattgaaaaggttttgttttaaattgtttaataatttaaaggatttttgtggaagtaattgtatttgttaattagttataattagtaattaatttttttggagttttaatttatttttggtaaaatgttttaggaagagtatatattattagaaagtatgttaaaaatttatttagtagaaaatttaaaaatagtttttttttgttaagaggttttttaaaattttatttatatagttaaattttgaaattttagtaggttttgttttattattataattattgtataaatatttttaaggattttgtttttagttttaagtatgatttatttttataagtttgattagttattatattagttttgttatggaaaatgatatgtttttattttttgttgtagagttgttaaattttgatttatatttatgttgttttttttgttgaaagtttgtagtgaaagaaatttttaattttttgttttgtaatattagttggtagttttatttaatgggtattttgtttttttaaagaatttagttgttttgtttagaagttgattttttgatgtttttaatgtttggtttaattgatttgttttaatggagtttttgttggtgaggagtgagatgttattgattagaatgttgggatttgttgtttaattgttaggagtgagagatattgagatttagaaatttttggaggtgggaggggagagggatagttttggatggaggtggagatgtaagataaagggatggattttatataggaaaaaaaaaaagattttgttgaggtattgaggtgttgtatgattatattttttaaaggagaagttaaaaagtaaggaagtgggaggaggttggaggttaaagtatttaaaaggattatttgggtataatttgtttttttgttggtgtttgtaaaggatagatagttttgtttttaaagtatatgaatgttttttttaagtgattgggaatggatattaattgtttgttaaatgttattaaatgtttttttaaatttaggggatatagaaagaggggtataaaaggagaatttaaatagaaaaagggaggatttggaggtttttgaaagtggggggagaagaaggaggagggataatagagaggaatagagaaggagagtggagagaagataaataaaaataaaaataggaattattgaataattatatattaaaaagaaagtttttttttatggggtatttaaaatattgagattgtaatagtgattttggttatggaagaaagatgtttttttttatttttgtttttgaaagtttttggttttgttattggtgattaaaattttattaggttaaagagtgtgtttaattgtttgaagaatgtagtagatggaaggtgggttttgttatgttgtttgttttttttgttggagagaatgaaagaaatgtgtagagttagagatttttgttgagttagatttttttttgttgttttaggttattggttatttggtaaagatttgagtaaggaatgtagggttattgtttgggttaataaatggagtttgtttttttttttttggatgttgttgtttggttgatgtttttggtaatttatttgtggtgtatgtagaggagttttttttttttttttagattatttgttttgattaatttgattttttaaatatatttgattgtattttttaggtggatatattaataggttatgggttggagaggagtgggtgatgaggagagggatttaaatttgtgaatgtttgggttgggttggagttgtggggggtttgggaggagagaggggagaagagagaaggaaggagagtgtttgttgggatggttgagttgttttggtgagtagttttggggttgtatgtttttgtgggagatgttgttgttgtttttaggttggtaagagtggttttaatattattgttttttatttttttttttgtaaatttttagagaaatgtttttggtttttttgttgtgatatttttagtttgtatttttttatagtttaggtggtgtgtttttgtatgttggagtgttggttgttagtaggatgtttttttttgtgttgatttgtttttttttgttttgttgttgttgtttttttgatatttttgtttttattatttttagtttggagagatgttatttagttgtggtttgtatttgtggtttggggttatgtgtggaagaggggtgttagtttggattttgtttttggtagggggtgttttggagtggagagtgaggtgaatggtatatgagtgtgtgggtagtttattttgaagtttgagttttttatttgagttatgttttgtttagttttatttgggttagtgtttggtgagtgagtttatttgtggtttttgtggttgttttttttttgtatttttgtatttatttgttgattttttttttttgggatttgtattttgttttattaattagagtttgattgtttttttttatgtgattttgggtgggttgaggatttgttgttttttaaatgttagagggatgtgggtggtagagtttgagaggtggttgttgggttgtggggtgttttgattttttttttattttgtttttttgggttttatttgtttgtttttggatttttgtttttttttgttttttggttttttagagttttttttttatggtagtagttttttgtgtttttggtgtagttttttagtggatgatttttttgttttggggttgagtttagtttttggatgttgttgaaatttttgagattatgtgtgggtttggttgttgtttttttgttgggtgttattgttattgttgttgtttttgttgttgttgtttgtgggatgtttagtagtttgttgtttggtttttgtgattttgtgttttttggaagttgtttgttgttgtagagttgtatgaattagttatggtgttgtgggagtttttgtggtagtgtagtagttggatattttgtgagggtttttgttggttgttgttgttgtttgttatgttatttattgtagtttgtttggtgaagtttgttgttttttttatttttttaagtgattgttaaatgtttattggttggaattgttttggtaagtttagaatttttgtttttgattttttaattttgtagaagaatatgtgtatttagtatagattagtttattttagtgtgtttttttagttttttattttttattgttttagatttttaatattatttatttttatttagagaaataaggggaattgttgtaggtttgggggtgaggggtggttttgggatgggtagaaagtgtaggtgtagtaggaaatttttgtatgtttgtgtttatattggagttgtgaggattttgagaaatattaaatgggatggttttttgggtttattgttttgaaagagtattaattttaggggaaatattgaaatagaagttttgttattattaaagaaaaaagttttattaggatgaggaagaaataattttatgagaaagaatgagtgagaaagtaataaattaaatggtgattgtaggggaattgttgatttttggtaaaggtgttatgaggttgtattggttttttgttgaagattaggttatatagattttagaggagttgggttttaatagaatttttttttttttttttttttttttttttttttttttttttttttttttatttatttattttttttttttttttattttttttttttttaggtggtaaaagatattggttttgtagtttagatatgtttttttttttgtttttttaagttttaaggtagtataggggagttgagaaaaagaatattttgtgggttttttaggttggagtgggtatgattgaggttggttaggttttatgtaggtgagttgagggtggaattgattttagtgggtgttgatttttttatttttggataggtttttgtggagtgggttaggtattttttttgtttgtttgggtttttttagattttgatggtgaatgtttggtaggttttgttttgttgaagttttttaattaaatagggttagaggatgggagttgttgtatttttagttggtatagtatttggtttgatagtttgtagtatagggtgtatgtaattttttattttttgtgaatataattttgttgtagttaaatttggttttgaataaagtgttttttaaagatgtatataagttgaagtgtatgtaattttagagaggagggaatgattaattgtaatttagggtgaaagtttgtatagtttttagttattattgatgtaaatgttaaaaggaaaattattatgtattattttaatttattttttataaagataagttgagatatgtaattttattagatttgggttaatagattgtttttttttttggtagtttttaaatttggtattttaataaaatttaatatgtttttataattttttgatttatgtgtatatgtgtgttgtttttgaaagaataagttttattttgttattgtttaattattttttagatgttttattatggtaataattatgagtttgtaaaaataatttttggaaatgttgatggttttgtagtttaatatagattggtttgttttatttttagtttttgtattgttttaggaaataattaatttaaatgtgaagttgatatttgtaattaagaaattatatatttattagatattttaaaggggattgtataaattaaagagaataaattggttttgtagataggttgttaagaatttggtattttgtttttatttttgttaatttagaggtgattaatttttatttgagttaaatagattattatagaaaatattgtgtttgtttatttttattattgaggttttgttttttttttgtttggatatattttaaataaggggttgttttagttgttgaagtaaaagaataattaaagatggggaaatggtaaaagggtatttagagattattattagtttttttttaaaatgtggagttttgtggttataaatattgtttatttaatgagtaaaaaataaaaataaaaaaaaaataggaagtaaatgttaagtttttatttattattgttagtattaatgtaagttttaaaaaatagtattattagaaaaggatattaaaggagaattgattagaaaagaattgtggaaaatggaaatgaatattgattatttaattagattttgaggttattagtagatagtgattttgtagtatagttatagttgttggatttaaaatttaggataagtattttaaagttttaaagtagtgtttttttttgttaaaaatttgtaagatgttttaatgattggagtgttttttttgaatttgagg

SEQ ID NO: 366 - DNA, 7833 bp, Artificial Sequence
  chemically treated genomic DNA (Homo sapiens)
ttttaaatttaaagagaatattttagttattaaaatattttatagatttttaataaaaaaaagtattattttgaagttttaaaatatttgttttaaattttaaatttaataattatagttgtattgtaaggttattgtttattgataattttaaaatttagttaagtgattaatatttgtttttattttttataatttttttttagttaatttttttttagtatttttttttgatagtgttattttttaaagtttgtgttaatattgatagtggtgaatgaaagtttaatatttgttttttgttttttttttatttttattttttgtttattaggtggataatatttatgattataaaattttatattttggaaaagagttagtgatgatttttgaatatttttttattatttttttatttttaattgtttttttgttttaatgattgaaataattttttatttgaaatgtatttagataaagaggaaataaagttttaataataaagataaataggtatagtgttttttgtgatggtttgtttggtttaaatgaagattgattatttttaagttaataggggtggaagtggggtgttaagtttttgataatttatttgtaaaattagtttattttttttagtttatgtagttttttttaaaatatttggtaaatatgtaattttttgattgtaaatgttaattttatatttaagttagttattttttaaaataatgtaagggttaggaatgaagtaaattagtttgtgttggattataaagttattaatatttttaaaaattgtttttgtaggtttataattattattataataaagtatttaaaaagtgattaggtaatagtaaagtgaaatttatttttttaaaaataatatatatgtatgtatgaattaagaagttatagaaatatgttgagttttattaaaatgttaaatttagaaattgttaaaaaagagaataatttattgatttaaatttaatagggttgtatattttaatttgtttttgtaaaggataaattagaatgatgtataataattttttttttggtatttatattagtaataattaggaattatataggtttttattttgagttatagttggttatttttttttttttaaagttatatatattttagtttatatatatttttgaaagatattttatttagagttagatttaattatagtaaaattatatttatagaagatgaaaaattatatatattttatattataggttgttaaattgaatgttatgttagttaggagtgtagtaatttttattttttggttttatttaattaggaagttttagtagagtgaagtttgttaagtgtttgttgttagaatttgaaggaatttgagtgagtaagaagagtgtttgatttattttatagaagtttgtttagaaatggaggagttagtgtttattgaagttggttttgtttttggtttgtttatatggagtttgattagttttagttatgtttattttggtttgggagatttgtaaagtgtttttttttttaatttttttgtattattttgaagtttagggaagtaaagagaggggtatatttggattgtaaaattaatgttttttgttgtttaggagagaagggaatgagagagagagagagatagatagatagagagagagagagagagagagagagagagagagagagagagagagaaattttattgaaatttagtttttttagaatttgtgtgatttggtttttaatgggagattagtgtgattttatggtatttttgttaggaattagtgatttttttgtagttattatttgatttattgtttttttgtttatttttttttataaagttattttttttttattttagtaagatttttttttttaatgatgataaagtttttgttttagtgttttttttaggattggtgtttttttaaaatagtgaatttagaaaattattttgtttaatattttttaaaatttttgtagttttaatgtaagtgtaagtatgtaaaggttttttgttatatttgtattttttgtttattttagaattattttttatttttgggtttgtaatagttttttttgtttttttggatagaggtgggtggtattaggggtttagggtagtaggaggtgaggggttgaggaggtgtgttagggtaggttggtttgtgttggatatgtgtgtttttttgtggagttaaagggttggggatgggggttttggatttattagagtaattttagttggtgggtgtttggtagttatttaaggaggtagggaaagtagtgagttttattgggtgggttatgatgagtagtatgatgggtagtagtagtagttagtaaaagtttttgtaaagtgtttagttgttgtattgttgtggggatttttatagtattatgattagtttgtgtaattttgtagtagtaaatggtttttgaggaatataggattgtgggggttgggtagtgggttattgagtattttgtggatggtggtagtagaggtggtggtggtggtagtggtatttggtggggaagtagtagttaaatttgtgtatgattttgagagttttagtaatatttagggattgggtttagttttggagtgagagggttgtttgttgagaagttgtgttggagatgtgggaagttgttgttataaggagggagttttgggaagttggaggataggaggagatgggagtttaggggtagatgagtggagtttgaggaggtagggtggagggagagttaaggtgttttgtagtttggtagttgttttttgagttttgttgtttgtatttttttggtgtttgggaagtagtaggtttttagtttgtttggggttatgtgggaagaggtagttgggttttgattggtggagtaggatgtaggttttgggagggaggggttgatgagtaggtgtaaggatgtaaggaggaggtggttgtggaagttatagatgggtttgtttgttaggtgttggtttgagtggggttaggtggggtatggtttaaatgagaagtttgggttttagggtgggttatttgtatatttatatattatttgttttattttttgttttaggatgttttttattgaaggtggggtttggattagtgttttttttttgtgtgtgattttgggttgtgagtgtgggttgtggttgggtggtgtttttttgagttggagatggtgggggtggaggtgttagaggagtagtagtagtagggtagagaggggtgagttggtgtgggagagggtgttttgttggtgattggtgttttagtgtgtgggagtgtgttgtttaggttgtagggggatgtaggttgggaatgttgtggtggagaggttagggatgtttttttagggatttataggaaagagggtgagaggtgatggtgttagaattgtttttgttgatttggaagtaatagtagtattttttataagagtgtgtaattttaaggttgtttgttgaggtagtttagttattttggtaggtgttttttttttttttttttttttttttttttttttttaggttttttgtagttttgatttagtttaagtgtttgtaggtttgaatttttttttttattatttgtttttttttagtttgtagtttattagtgtgtttatttgggaggtgtggttagatgtgtttggaaggttagattggttgggataagtggtttgagagaaagagaaaggtttttttgtatatgttgtgggtgggttgttgggagtattggttgggtagtggtgtttgggaaggggagagtgggttttatttgttggtttaggtagtgattttgtgttttttatttgggtttttgttggatggttggtgatttggggtgatgagagaaggtttaatttggtaggagtttttggttttgtgtgttttttttattttttttagtgggaagggtaaatggtatagtgggatttgttttttgtttgttgtattttttaggtagttagatatattttttagtttaatggaattttagttgttagtaatgggattaagagtttttggggataagggtggagaggaatattttttttttatgattggggttattattgtagttttagtgttttggatgttttatagggaagagttttttttttggtgtgtgattatttagtgatttttgtttttgtttttgtttattttttttttgttttttttttttatttttttttgttatttttttttttttttttttttttgtttttaaaagtttttggattttttttttttttatttaaattttttttttgtgtttttttttttgtgttttttgaatttaggagagtatttgataatatttaataggtaattagtgtttatttttaattatttaaaagaggtatttatatattttgaaaatgggattatttattttttgtagatattagtagaaaaataaattgtatttgagtaatttttttaagtattttaatttttaatttttttttatttttttgttttttaattttttttttgagagatgtgattgtgtagtattttagtgttttaatgaaattttttttttttttttgtgtgaaatttatttttttattttatatttttgtttttgtttgagattgtttttttttttttttatttttaaagatttttgaattttagtgttttttatttttggtaattaagtagtagattttagtattttagttggtggtattttgttttttattgatgaagattttattaaaatagattaattagattagatgttggaggtattagaaaattggtttttagatagagtagttaaattttttaaggaaatagaatatttattagatagagttgttaattaatattgtaaaataaggaattagaaattttttttgttataggtttttagtagagaaggtaatataaatatagattaagatttaataattttatagtagagaatgagaatatgttattttttatagtaaggttggtgtggtaattaattaggtttatgaaaataagttatgtttgaaattaaaggtaaagtttttaaaagtgtttatgtagtaattatgataatgaaataggatttgttaggattttagagtttggttatgtaagtagaattttagagaattttttagtagaggaaaattgtttttgaattttttgttaagtaaatttttggtatattttttaataatatatgttttttttaagatgttttgttaaaagtaagttaaaattttaaaggagttaattattggttgtaattggttaataaatgtggttgtttttatagaggttttttaaattattaaatagtttgaagtaaagtttttttaatgggaatgttgtaattttgttgtatttattttgtatttagtgttatagtgttattaagaaataaattttgaaattggtaagtattattaagtggtagaagaatattatttattgagtagagaattgtattattgaatatgtaaataaaaatatatatattatttagatttgttattaggtattaaagaagtagataagattgtattagtaattggattagtgttttaatttttttttagtaaggtaaaattagtttatttattagaattaaatttaagtttatgaattgtattttgtattgtgtattatatgattgttagtaatatgatataattatattatgtatttgtaaaatttttattttaaaatattatattatatttatttttaatttttttgagttagaatattttatttgtggtatatatattttagaattgatgtagaggagtagagtttagttgttagattttttagtagaaatagtgtagatatattttttttagaaaatttaagaatattttttttttttatggaaagaatattattataaagtgtgagattatttatagtttaagtagggggtttgggagttattttttaataagaatagtttaagataaataaatgaatttgggaaaataagatatattgttaattagaatttttattttttttatgattttatattttttgattgttttaataaaggtaagatgtattttttgttttttaggtgttaggtattgtgttatgtaggatagaatatgttatttttatttaatttttaaaatatttttatgagataaagaatattattttattttatataaaaggaatatggttttgaaagtattaggtaatttgttttaagaaataaattttgttagtgatattgttgggattttgtgaaattttgtttgattttagagtataagatataagttattaatttttgttgtattgttgtttgttagtttttgagaggggaaattaattgggaatgtattagttttgtttatgatattttatttgttttttttgtggagttgtagtaaggtttaaattttaatttttaaattttggtaataagatttagtgatttttgaatttggttgattatatgaattttttgagaaattttgaaataatagataaattttaagttttattattagggatttagaaaatttggagttgggttttgggatttatattttaatatttatttttgttggagaagtaaggtattatttatatttatatgataaatgaaaggatattttgatttttgtttagtttttatagagaggtttttgagataggttaaaagtttttatttagtgtaaagatgagttgttgtatatgtttgtttttttgtttttatgtatatgtttattaaatatgtattaagtttttaatatgtttgatatagtaattttgtgattgtagataatttttttatttgtaaaatgtgagtaataataatatttgttttttgggtttgttttaaagattaaaataaaaatgtatggtttaatggtagtggatttggggggattttttatataaataagtgaatggaggtatgaataaataaatatataaagatgtgtgtatttatatttatatatataattaaaaatagttaaagatgtataaattaaagttaaatgtatgtgatattgaagtatatgttgattattgataatgaagtatagtataatttttaattttatattttaatattttatatttaataatttatattttaatttttagtttatttaagatatatagatatagatagaatgttttaaatgtattattgttttagttttaatgtataatatttatatgaaaaagtatttattagtgtgtagtaaatgtattagaatattatttataggttaaatgatattgataatgttttagagttgttatttttatttttggataattttttaaattgagagtaattaaatttgttatttttttatttttttttataatggtaaataatatataaataatgagttgtgatttaaagaaataattttataatgtaaaagtttttttatgttttattgatttttatgtttttaattaattttggtagtttaagtttgtgattttagtgttgaggaaagtttattttattttagagtagtggggtttagttatgattttatattataattatttggataattaaagaatattgatgtagagtttgtatttaaagatttggaatttttagaagtgatatagaagtattggtatatatatatttttaaagtttttttggagaaatatatagttatgattgagaattattgttttggggaaagtgattatttttttattatttaaatagttaagttttaggaggtaaaatatttatatttttttttattaaaatttgtaaaatatatattttattaaagat

SEQ ID NO: 367 - DNA, 2501 bp, Artificial Sequence
  chemically treated genomic DNA (Homo sapiens)
gtaaatttttatattttgaggagagatagggttttattatgttggttaggttggttttaaatttttgattttaggtgatttatttgttttggttttttaaagtgttgggattataggtgtgagttattaagtttgatgggtagtaatttattttttatataattttttttttttttttttggtagagatgaggttttgttatgttgtttaggttggtttaaaattattgggtttaagtgatttgtttatttgggttttttaaagtgtagggattataagtatgaattattatgtttggttgtaattttttatatattttggatattaattttttattagataatatagtttgtaaattttttttttttttattttgtaggttgtttttttattgttggttattttttttgttgtatagttatttttaagtttgttgtaaatttatttgtttattttttgttttgttgtttgtgttttgttgttatatttaagaaattattgttaaatttattgttatgaagtttttttttatgtttttttttaggagtattatagttttaggttttatgtttaatttttaataagttttgtgtttttgtatatggtgtaaggtaagggtttaattttatttttttgtatgtggttatatagtttttttagtattatttgttaaagatataattttttttttatgttttggtgttttaaaaaaaaaaaaaattttggttggttatggtggtttaggtttataattttagtattttgggaggttgaggtaagtggattgtttgaggttaggagttttagattagtttggttaatatggtgaaattttgtttttattattgaagatataaaaattagttaggtgtggtggagtatgtttgtaattttagtttattagggaggttgaggtatgagaattgtttgaatttgggaggtagaggttgtagtgagttaagattttattattgtatgttagttggggtgatagagtgaggtagggttttattttgttgtttaggtaggagtttagtggtttaattatggtttattgtagtttatattgttagggtttaagttatttttttattttagttttttaagtagttaggattataggtgtgtgttattatgtttagtaaatttttgtattttttgtagagatggggtatttttatgttgtttaggttggttttgaatttttaattttaagtgatttttttatttgggttttttaaagtattgggattataggtgtgagttattgtgtttgatatggtgttttttaatttatttttattttttatttttatttttttgagataaggttttgttttgttttttaggttggaatgtagtggtataattatggtttattgtaatttttgtttttttggtttaagtgatttttttgttttaatttttggagtagtttggattatgggtatatgttataatgattagttaatttttgtttttttttttttttttttttttttttttttttttttttttttttgagatgtagtttttttatgttatttaggttggtttaaaatttttgggtttaagtgatttttttattttggttttttaaagtgttgggatgataggtgtgagttatgtggtgtttaaaaaaggtaataaaaaattttttatatattgggtatagaagtggtatgggtttttatatattgtgagatttttggtattagttataaattttgtgtatatttaagattttttagagtaggtgtaattattttgttttatagatgaggatatagaggttgagttgtagtgatttatttaaggttgtatagttagtaaatagatggaggttggattggaattgaggattttatttaagggtttttataaatttttgggggttttttgttgttttatttttattatatttgaaagaatgaatgaatgaatgttttgggtattgtgtttattttttagtaaattgtggagtttggatgagtttattgttttgtgtggggggggtgtgtgtttgttttgtgtatgtgtgttttttgggtatggttggttttgttttatttttttgtatagggtattgtttttttttgtttggtatattttttttttttttatgtttggattggggtggtagatgttgtttttgtttattgtttttttttattggtttttgtgtgaaaagttggggtgtttgtgttgttgttgttgtgtttgttgaagtttttgagatgttggtgtgtattgttttagtttgggtgtttatattggttgttttggttattttgttgtttgatgatgtttgtaggtggtaggtattatgggggggaatatggatttagggggataggtagggtgttgggtggggggttgtttttttttggggtggttggtggttgttgttgatagatgggtgtgtatgtgtggggtggtgtggtgtgtagtggtagttggtgtgggtagggtggtatttttggttgtgtgtgtttgggttg

SEQ ID NO: 368 - DNA, 2501 bp, Artificial Sequence
  chemically treated genomic DNA (Homo sapiens)
tagtttgggtatgtgtgattggaagtgttattttgtttgtgttaattgttgttgtgtgttgtattattttatgtatgtgtgtttgtttgttagtagtggttattggttattttgaggggaagtgattttttatttagtgttttgtttgtttttttgagtttgtgtttttttttatggtatttattgtttgtggatattgttgggtagtgagatggttgggatggttagtgtgggtatttgggttggggtggtatgtgttggtattttggaggttttagtagatgtggtggtggtagtgtaggtgttttggttttttgtgtggaaattgatggggaggggtgatgagtggaggtggtgtttattattttagtttgggtgtgggggaggaggggatgtattaaatggagagaggtgatattttgtgtagaaggatggaatggagttggttatgtttagggaatatgtatgtgtaaggtgggtatatattttttttatgtggagtagtgggtttgtttaagttttatggtttgttgggaggtgggtatggtgtttgaggtatttatttatttatttttttaggtgtgatggggataaagtagtgagaagtttttaagggtttgtgagagtttttgagtaaagtttttagttttaatttaatttttatttatttgttggttatatgattttaggtgggttattatggtttagtttttgtgtttttatttgtaaaatggggtaattgtatttattttagaaaattttgagtatatatagaatttgtagttagtattaagaattttatagtgtatagaggtttatgttatttttatatttagtgtgtggggggttttttgttgttttttttaagtattatgtggtttatgtttgttattttagtattttgggaggttagggtgggaggattgtttgagtttaggagttttagattagtttaggtaatatagagaaattgtattttaaaaaaaaaaaaaaagaaagaaagaaagaaagaaaaaaagaaaaataaaaattagttagttgttgtggtatgtgtttatagtttaaattattttagaggttgaggtaggaagattatttgaattggagaggtagaggttgtagtgagttatgattgtattattatattttagtttgggagatagagtaagattttgttttaaaaaaataaaaataaaaagtaagaataaattaagaagtattatgttaggtgtagtggtttatgtttgtaattttagtgttttgagaggtttaggtgggaggattgtttgaggttaggagtttaagattagtttgagtaatatagggatattttatttttataaaaaatataaagatttgttgggtatggtgatatatatttgtaattttagttatttgggaggttgaggtgggaggatggtttgaattttggtagtgtaggttgtaatgagttatgattgggttattggatttttgtttgggtgatagggtaagattttgttttattttgttattttggttggtgtgtagtggtgagattttggtttattgtaatttttgttttttaggtttaagtgatttttatgttttagtttttttagtaggttgggattataggtgtattttattatgtttggttaatttttgtatttttggtggtagagatagggttttattatgttggttaggttagtttgggatttttagttttaagtagtttatttgttttagttttttaaagtgttgggattataggtttaagttattgtaattagttagaattttttttttttttaaagtattagaatatgggggaaagattgtgtttttaataaatggtgttgagaaaattgtataattatatataaaagaatgaagttggatttttattttatattatatataaaaatataaaatttattaaagattaaatataagatttgaaattatagtgtttttagaagaaaatatggggaaaagttttatgataatggatttggtaatgattttttggatatgatagtaaaatataggtaataagataaaagatagataaatgggtttgtaataaatttaaggatagttatatagtaaaagaaatgattaatagtgaaaaggtaatttatagaatggggaaaaaaaaagtttgtaaattgtattatttggtaaagggttaatatttggaatatatgaaaaattatagttaggtatggtggtttatgtttgtgatttttgtattttgggaggtttgggtaggtagattatttgagtttggtagttttagattagtttgagtaatatggtaaaattttgtttttattaaaaaaagaagaaaaaaattatataaaaaataaattattatttgttaggtttggtggtttatgtttgtaattttagtattttgagaggttaaggtgggtggattatttgaggttaagagtttgagattagtttggttaatatggtgaaattttgtttttttttaaaatataaaaatttgt

SEQ ID NO: 369 - DNA, 4138 bp, Artificial Sequence
  chemically treated genomic DNA (Homo sapiens)
gaattttggatttggatttatgtttttgtttaaattttatgttaaattgtaaattttaatgttggaggtggggttttgtgagaagtgattggataatgtgggtggattttttgttttgatgttgtttttgtgatagagattttatatgatttggttgtttaaaagtgtgtagtatttttttttttttttttttttttttttgtttatgttttgttatgtaagatgttttttgttttttttttattgtttagaatgattgtaagttttttgaggtttttttaggagtagaagttattatgttttttgtataattgtagaatgatgagtgaattaaattttttttttttataaattatttagttttaggtatttttttatagtaatgtgaggatagattaatataattttttatttttagatttttgtatatgtttagttttagatattattgtttttgggagtatgtatagtgtagttttttgttgataaaagtaaagttataaaggtgataaaaatttgtatttggggatatttgattgtgaaagaggatggatagtatatttgtagttatagagattggggtttattgagttgaaatttggtagtattttggtataatatgtgtatgatttgtgtttaatgtttagagattagtgttgagtaaaatagtttggtttggggttgttgttgtttttattttttttttgtttattagagggtggtagagttttttttttttattttggagtttttttaggggttgttgatttttttagttgggtttatagtttagtagggtttatttttatttgggttattttggtttatgttttttttgttttttgagttttttatatggattttgttagtttttttttgtagtttattggttgtttatttgaggtttgttggttgtttatttgaggtttgttggttgttttttgtaggtagtttttgttttttatattttttttttttttgggtttagttgaaagggtgttttttagggtagttttttgtgatttttagtatagtttagttttttataggttttgatgttttttatgttgttattttatagttttgttattattattaattttttagttttatgaagtttattgagtgtttgttttttggttataggaaaattttgtgatagggattatgtttgtaatgttttttgtggaattttaaggtttagtttagtgtttgatatggaatagatgttttataaatattggttaaatgtgtgggagatttttaaaaatagtatattatttttgtgtggtttttagtagttagagtttgttttatgtggatataggggtattggtattagtatgggaggaggttagtaagtgtttgtggttgttttaggaatgaggttttaatttttagagttttagaagggaggatagaggtttgtagggaatagattttttggtttgattttgtagtttaatttagagtttagggttagtttatattatgttgattttggttagtatttttagggtagttttagataaggttggaggtttttttttttgttttttagggggtgatattgtatatagatattatttaggaaatggatttttttggataggaatttggttttgttaaggaagtggaggtggagtttggtttttattttttgttttaatagatttttttgattttttttatatatttgttttgtttttttttgggttttatgaggattttgttttgttaggggtttttgtgtaattttagatttttttttggtattattatggggaaggtggggtgattataggatagttagttttgtagagatagagattatttaggatagttagggagaatatggataggttttgagttgtagttttagttaatagatatggagagggagggtttttttggagttttttttaaggatagtagagtttagagttatttatttttttttattatagttttttttttttaggatatataagatatttttttttttatatgtaggatttggggatttttgagatttttgggtttgggtttttatttttgggttagtggtggggttggtggtattggagatagagggttggtttttttttagttattatttagtgagtttttttttagtttttagagttatttttgttatttttttgttgggtattattttatttttttagagttttggagagtatggggagatttgggattttgttgggtttttttgttataaaggaaaataatttttttggtgtgatagatttaaggatagaatatagtagaggttagtattggggaagataggttgtttttttaggggatgggggtggatttattttgttgaaaagatttgtttgaggaattgaaaatagaagggaaaaaagaggagggataaaagaggtagaaatgagaggggaggggatagaggatatttgaataaagattatattttgatttatgtgatgttgagaagtatttttgttttaggaagagatttagggtagagggaggaaggatagtagattagatagttatagtagttttgataaaatgtttttggaatttaagtttttttttatagaggaggatagagtagatagtagagattatggagttttttttggtttttttttatagatggtgtattttttggtagaggtttttgtttataggtgaagggaggataatttgggagagggtgggaggagggagtatagagattggttggggttttttgggtaggatagggttgtgagatggatagaggtttttgttggagtttgaatagggaagaggatattagagagggataggagttatattagaaaaattaaattgaattggaattggaaaggggtaggaaaattttaagagttttatttttttagttaattgttattggttattatgtttttaaaaattataataattgtattatatgatattttaaataaaaatataataattgtattagatgatattttaaataaaaatataattagggtatgaaatattgtttttatttgtttattgtggatattggaaaataagttttaggttgtggagggttttgggaatttttatgaatttatttataggaatttgtagtttgttttaggtattggggtgtaattaagattatataaatttttgtttttatgaagtttatgtttttatggggaggaagatagatatataaagagatttagaatgtgaggttaggtgttgataagagttttggaggaatagagtagggaaaggttagaaaaggaagatttagggtttttagaggaggtgttagggaagggattttttaagaatgttttgatgtgagtaggatttgaaggtaatggggagggagttgtgaagatttttggaaaagtagattttatatagggaaatgttaaggttggaggtgttaaggaaataggagatatattgttgattttgatttagtaggatatatatatatatatatatatatttatttattttagggttgggggatgaagagatttgtttaggatttaggattttatttttttattttaatgtataggttttaatattgattgatgttttttgtttttttttagttttatttttaattttttggaatttgtttattattgttaagtttattattgaatttatgttgtttaatgttgtagaggggaaggaggtgtttttatttgtttataatttgttttagtatttttttggttatagttggtataaaggtgaaagagtggatggtaattgttaaattataggatatgtaataggaatttaataagttattttagggtttgtatatagtggttgagagataatatattttaatgtatttttgttgatttagaatattatttagaatgatataggattttatattttatatgttataaagttagattttgtgaatgaagaagtaattggttagttttgggtatattgtgagtgatttttttatgatttttgggtgttgggggttagttttattttttatatataggattattaggtttgggttgtgttgtggttttttttgtattatgtattatgttagggtttgggtatttagtgtaggatatatatagaagagataaattttaatagattagaattt

SEQ ID NO: 370 - DNA, 4138 bp, Artificial Sequence
  chemically treated genomic DNA (Homo sapiens)
gaattttgatttgttgaagtttgttttttttgtgtgtattttgtattaaatgtttaaattttaatatggtgtgtaatgtagagggggttatagtatagtttaggtttgataattttgtgtgtgggaagtagaattgatttttaatatttagaggttatgggggaattatttatggtatatttggaattggttagttgtttttttatttataagatttgattttatgatgtgtagggtgtagaattttgtgttattttggatgatgttttggattagtagggatgtattggggtatattattttttgattattgtatgtgggttttggggtagtttgttgagtttttattatatattttataatttgatggttgttatttatttttttatttttgtattagttgtagttaaaaagatgttggggtagattgtggataagtagaagtattttttttttttttgtgatattgaatggtgtggatttaatagtgagtttggtagtggtgggtgggttttagaaggttagaagtgaggttaggagagagtagagagtattggttaatattgggatttatgtattagggtggaaaaatggggttttgggttttgagtaggtttttttattttttagttttggagtgagtgagtgtgtgtgtgtgtgtgtgtgtgttttattaggttaaggttagtagtgtgttttttatttttttagtatttttgattttggtatttttttgtgtggaatttgtttttttaggggtttttatggttttttttttattgtttttaggttttgtttatattagggtatttttgggagattttttttttgatattttttttagagattttgggttttttttttttgatttttttttgttttatttttttagggtttttgttaatatttgattttatattttagatttttttgtatgtttgtttttttttttatgagagtatgagttttatgagggtagggatttgtgtgattttggttgtattttagtgtttgggataggttgtagatttttgtggatgagtttatgagggtttttagggttttttatagtttggggtttattttttaatgtttgtggtaggtggatgaggatagtgttttatgttttggttatgtttttatttaaagtgttatttgatgtagttattatgtttttatttaaagtgttatgtgatgtagttattatgatttttaaaaatgtagtggttagtgataattaattaggaaaatagaatttttgaggtttttttgtttttttttaattttagtttaatttgatttttttggtgtgatttttgtttttttttgatgtttttttttttatttaggttttaataggagtttttgtttgttttatagttttgttttatttaggagattttagttagtttttgtgttttttttttttatttttttttaggttgttttttttttatttgtgagtaggagtttttgttaggggatgtattatttgtggggaggggttgagggagattttatggtttttgttgtttgttttgtttttttttgtggagaagagtttgagttttaggaatgttttgttaaggttgttgtgattgtttggtttgttgttttttttttttttgttttgagtttttttttagggtaggagtattttttagtattatgtgggttagggtgtggtttttatttaggtgttttttgttttttttttttttatttttgttttttttgttttttttttttttttttttttatttttagttttttagataaatttttttggtaaggtggatttatttttattttttgggaggataatttgttttttttagtgttgatttttgttgtgttttgtttttgggtttgttatattagggggattatttttttttgtgatagagaaatttagtagggttttgggtttttttatgttttttagggttttgggaaggtgggatgatgtttaataggaaggtgatagaggtggttttgggggttagaaaaaggtttattgggtggtggttggggagggattagttttttgtttttagtattattaattttgttattgatttagggatggagatttaggtttagaggttttaggagtttttagattttgtatgtagagggggaggtgttttgtgtgttttggaaagagaggattgtggtggagggaggtgggtgattttgggttttgttgtttttggggaaggttttagggggattttttttttttgtgtttgttggttgaagttgtggtttagggtttgtttatgttttttttgattgttttgggtggtttttgtttttgtgaggttgattgttttgtgattattttattttttttatggtggtattaggagggagtttggagttgtatagggatttttggtagaatagggtttttataggatttagaaaggaatagagtaggtatgtgggagagattagaagggtttgttggagtaagggatggaaattaggttttatttttatttttttagtaaagttaggtttttgtttaggggaatttgttttttgagtgatgtttgtgtgtaatgttattttttggagggtaaagaaggagatttttggttttgtttggaattgttttagggatgttgattagggttgatgtggtgtgagttgattttgaattttggattaggttgtagggttaggttggaggatttattttttgtaggtttttgtttttttttttgaagttttgggggttgaggttttatttttggggtagttgtgggtatttgttggtttttttttatgttggtgttagtgtttttgtgtttatatggaatagattttgattgttgggggttatatggaggtgatatgttgtttttagagattttttatatatttaattagtatttatggagtatttgttttgtgttaggtattgggttgggttttgggattttatagagagtattatagatgtggtttttgttatagagtttttttgtaattgggagataggtgtttagtgaattttatgggattgaggagttaatggtaatgatagggttgtgaggtgatagtatagggggtgttggagtttgtgagagattgagttgtattggagattatagggagttgttttgggagatgtttttttagttgagtttggggaaggagggggtgtaggggataggagttgtttgtagagggtagttgataggttttaagtgggtggttgataagttttaggtgggtggttgataggttgtagggaggagttgatagagtttgtgtgaggagtttggagggtgaggaggatgtgggttgaggtgatttgggtgagggtggattttgttaggttgtgggtttggttgaggaggttagtagtttttggggaggttttagggtgggagggaggaattttgttgttttttggtggataggagggaagtggggatagtagtggttttagattaggttgttttatttaatattgatttttagatattgaatatgggttatgtatatgttatgttaaagtgttattaggttttagtttggtgagttttagtttttgtggttataagtgtattgtttatttttttttataattagatgtttttaaatgtagatttttgttatttttgtgattttgtttttgttggtaggaggttgtgttgtgtatgtttttaggggtagtgatgtttggggttaagtgtgtgtggggatttgggagtagaagattgtattagtttgtttttgtattgttataaagaaatatttgagattgggtaatttataaagaaaagaggtttaatttgtttattattttgtagttgtataggaagtatagtggtttttgtttttggggaggttttagaaaatttataattattttggatggtgaaggggaaatgaggaatgttttatatggtagagtatgagtaagagagagagagagagaggggagaggtgttatatatttttaaataattagattatgtgagatttttattatagaaatagtattaaagtagaaaatttatttgtattatttaattattttttataaggttttatttttaatattggggtttataatttgatatgagatttgggtggggatatagatttggatttggaattt

SEQ ID NO: 371 - DNA, 11222 bp, Artificial Sequence
  chemically treated genomic DNA (Homo sapiens)
ggtttggtgttggtttaggagggtagattttgttagggaggtataagttaagttgggggtggggtgggagggtttgttggtaggagggaggtattgtttagattggtttttaaaggttggtttttagaaggaggaggaagagagtagtgaagattgtggggagttttggttttgaggagttagagtttttttttttgttatatttttgattttttttggtggtgttttaagtttagatttattaaagggaattgttagttgtttaagggttagtaaatttttaggttatttagattggattttttgattataaaaattgtgggttaggtgtatagttgtttgaggggtttaaatttgtgtaggtgggtgttggaattttttttgttatagtgttttttttgtgtgtatgtgattagaggtgagagtggttggagattgaagatggtagagtttgtttttttttattagattgaggtttttgatttgttttgtttggggagggtgtttagtggaagttttgggatgtttagtttggataagaaaagttttgggtgagtttgtttttttttttgtgaggtagatttagttgggtttttatatttttaaggagtaggtggagttgttgtaaggaagtgtatgtgatatggaggtattttttggtttgatataaaaaaggatttttaaagttttaggtagtgagtttattatttttaggagtatttaagtagatgttagatgatgatttgtagggaaaattatgtttagtgggaaattggataaaatattgttgaaggttttttttagttataagatattatggttttataattttagatttttttgtttttagttttttataagtttggaatttagaatttaagtttttttggtgttgaaaagttgaagattttgatattttagaattttaattttgggattttaagattttagaattgggagttttgaggatgattttataagttttagttttggatttaaaggattttgtgatatgaaagggaaaaagaggaggtttgatttggtgggatttagttttgttttattgggtattagattaatgtgttttgtatttgtgtgtgtgtgtgtgtgtgtgtagtatgagtgtgtaaggttgtagaaagttttgtatataaaggtagtttggtttttttattatgtgtttgtagtttttttgttttggttataatgaaggttgttatagggataataatagtttttaaatagagttggtgattttaggtagttatagtaattgtgaggtaatgttgttttgttgtagagatgtgtgagtataaatagatgttggtgtttttttattagtttaaatggtaaaatttaaaaggtttattaattttaaagttataggtttttatgagtatgttagttaatgggggtgtttgttaagtgggtgatagttttatattaaatattttagtattagtaatgggttgatgagattttaaatgtttaggttatttttagataatttaggaggttagagatgggagaagagttgggatttgggtagtaattagttttgttttgttttgtatttttaggggtgttttgatatttttgggagggtataggttagagagtatttgaaaattgtatattgtgttttaatttttaggagttttagatttgttttttggttttttttagtgtattaggtagggggttttaggttagatgtggtatagtttaatgttatttttttttttttgttttttttttttatattttggatttatttttagtgagtgattagtagtaagggttaaattgttgagagtttgagattggggtagatttttttagagttgtttttttttttgaggttgggtttggtatagattggggttttagtaatgggtttttaaatgaatgaatgaataaaggaataaatagatgattgattgattgaatgaatgaatgagattttttttggtatttttatggtttttttttttttttttgagatggaggtttgttttgttgttaggttggagtatagtgattttggtttattgtaatttttgttttttgggtttaagtgatttttttgttttagttttttaagtagttgggattataggtttgtgttattatgtttagttaatttttgtatttttagtagagatagggtttgaatatgttagttaggatagttttgattttttgattttgtgatttatttattttagttttttaaattgttgggattataggtgtgagttattatgtttggttttttatggtattttagttatttattttgttattgttttttttattgttaaagagatgggtttttggaggttggttggtttagtatttggggttgatttttggaatggttattagggaaggggtgttagaggtgtagttggtgtttttgatttttttggttgttaggagttagttgatttagtatataggatttattgaatggagatataaggtttttttagggagtggtggtttatggtaattttagaatggttattagttaggttttagagatttatatagagggtgttttgatttaaagttgtattggggaattttaagtttggggattttttgaatttaattttttttttagttatattttttattatttgtttaatttttattaaatatttttgtttatattttgaagttgggatttgattggtagagttagtagatgttgattatttagatggagttttgatattggtttttttagtttggttgtgattggtagtaggtttgtgggagaattgtgtgttttagaatatgattggttatatttgtattttagtaagattggggtagggtagttatttttaaaaagttgtgtaggtggggtagttattattgataaatttagtgtagatttaggatggtttaaatattggtttattttttttgaattttattttttatagttgtaaagtggggtggtgtttgttattttatagaggtgttgtaaagattagatgtaattttgttaagtagttattttgtaaattgtatagttttatgtagatggaaggaagggtttgtgtttattttgattatagtattaaataaattgtattgtatttttattttttttagttatttttttaaaaagattttgagttttttgaatataggaaggtgttttatttgattttgttatttttagtatgtagtagtgtttgatatatagtaggtgttttattattgtgagagggatggatggatgggtggagttatagatggatagaaggatagatggagggatgggtggatgatggatggatagatggatggaggggggatgatgaatggagggataatgagtggatgaatgagggaatgggtggatggatggatggagggatggaggaatagatagatagatggagggatgggtgggtgatggatggatagatggatggagggagggatgatgaatggagggataatgaatggatgaatgaggggatgggtggatggatgaatggagggatgatgggtggatgaatgaattgagggatggatggatgaatatatggatggatggatagatggatagatggaggaattggtggattttggatggatgggtggatggatagatgaatgaatgtttggatagataaagagatgatggatagatgaatagatgaattaagggatgttggatagatggagggattgatagatgttggatggatgggtggtggatggatagatgagtgaatgtatggatagataaagagatgatggatggatgaattaagggatgatagatggatggatggatgagtaattggatggataagtggataaatggatagatggttgaatatttgaatggattgaaggaggatgtatggatgtaagataaggttaattattttttattttttttttttgtaaaattatttatttatttatttaataaatatttatttagtttaaatttggtataaagtattatgtgaggtttaagagatatgtgggttaataaaatagagtttttgtttttttgaaaattgtaaagaaaggggtgtggttttttgagtttaaattttaattttgttagtgattagttgtatattagtgatgtttttttatttttttttaattaaatagggataatgttagtatttattatattgggaggttttgtggggattaaatgagttattaaatgttaagtgtttgggatagggtttggtatttagtaaagttttttgtgagtgttggttgttattattttaatggagaagatggtatgaaaattaggaaataggatgttttttgggaagtaatgtaataggaatttatataaagaaaggaaaggaggaagtaattagtggtgttttaaaggagtatgttaagaaaaattttttagagggaaatttttgagtagggttatgaaaataggagttttttaagagattgtggatttgtttgggattatttggttataagtataaaattatttggtttttttttgttatttttggttgggtgaggggtttttggtaaaggggtagaaggtgtgtgagaggttgtgaatggttaggattgttttggggttagttggggtatttggtggttaagtttagaaatatgataggtttttttgggagggttgattgtagggagtgttgggttttaggttgttggtgttggtttttgtggtgttttttttgttggttatgagagtttagatagtgtttaattttttttttttttttttatatgtataattattttattttttgtggtttgagttgttttgttttgttataatggtatttgttttaaaatagttttttatgtgagggttagagaaaggaaaagattagattttttttggatgagagagagaaagtgaaggagggtaggggagggggatagtgagttattgagtgatttttgttaagtattttagaaggtataaaaatgtttttgggattaggtagttttaaattttagttgttggggttaggatatttagtgagtttatatttgttttttttgttttttttagattgtgttatggggtttagtgatggggaatggtagttggtgttgaatgtttgggggaaggtggaggttgatattttaggttatgggtaggaagtttttattaggtaaaaggaagagattttattgtttttgttatttatattttaagattaagggtgtttagttgtaaggtggaaagtttgtatgtggggtaggttagttggttgtattagttaagggtgttagaatggttatttgttttttttttgtttttaagtgttagggattggatttaggagagggaaaggagttattttaggttgatgttagtagttggaggaagtatgagaattaaatttaggatgtttagagtttattaggaagaattttagaattatagatagttagagttaataagggttttgagagattttgtatagttattttttttataggatgaggataaaaagggattgagaaggggaggatatttttagagttatagtttattaaatgtttttaaagtgttaaggttaagatatgttttttaaggggagatagatttggttttagatttggttttgttattgagttattgggtgatttttgggaaagtatttaattttttggagttttaatttttttttttgtatagtgaggggatattttaatatttatattttagaggagatgtgagaattaaataaaataatgtatgtaagaggtttggtatggtttttggtatatattgagttttagaaatgttagtagttattattgatgaagtttaggttagggattttttaaagtattgtaattagagaatagaagatagaggtttattagtgatttttgatgttgagtatgtttttagtttgagaggtttgaatgatgtggtttgtaagtatattttgttttttattataagggattttagaatatattaaagaaaataaaattttgaggtttgtaaatagagggtggttgtggtttgtatatagaagtttatttttttgttgttttttattttaaaggtgatatattttttttttggtttttttttttattattttgagttggtttttttagaagtttaataggttaagaattaatgtttttgttaatgggaggaaggaagtgggtgttggggttgttataagtgaatggattgtttttggtattttaatttgtagattaatttttttttatttgtgagttagagttaattttttttttttattttgttgttttttgggttttttttgggttttatttatttttagtttttgtttattttgggagtatggttggttttggaagttttgttatttaaaatttgagttgttggtgatttgtgttagaaatatttgaggaagaagagttgagttttttgttgattgtaatggtattgtagtgtgtttatgtttttttttttttgtttttgttatttggttgtaataggttttgttggattgtataaagtgtttttttgattaatatatatatataaattgatattaatttttgggttatagatatgttatgtgattttggataagtttttttatttttgggttttatttttttgttggttgagtgaagggattgttttttatggtttttgagattttgttttatgtttatgttttagaattttttgagtttttgatgtatttttgtttttggtgaggaggtaggatagttaggtgtggaggtaggagattagagtttgtagagtagaggtttttttaaggtgatttgggagttgttagatttaaggtagtgatttgtatgttttgaaagagatttagggtgttgtattattagggaggattatggaggtttgttgggggttgggagttagggataagatataatgtttagggttgttggtttttgaaaggttttagaggtttggtgttttgttatgttttaggttgtgggatatgtagagattgtgttagttggttttgtttttttagtatttggggtatagggaggatggtttttttgggggtagggtggaggaggtttatgtttaggattgtaaatgttatttgtgagagttggtattttgattttgttttagatattgattttggattttttaattgattttgaaaggttatgtttttaattttttgattgtaaaagagggtaaattttatgaagtttagtttgtaaaatattgaggtttttattgtatgtatataaatataaaattttagaatatagaagttggaaggttatttggagattttggttttaggagtggggttttggaagggagggggttgttgagtgggttttatatttttgttttttttttttttatttaaattttttttgttttatttattttggttgttttggggagtggggggaataaaggattttaaggttataaaatgtttgaaaattattagtggtggttattattttttattatagggaggaattgggtttgagagtttttattggttaatggtagttataggtaggattaaaaatttttgggtgatggtgatgataatgataatgataatgataatggtagagatgatgaggaggagaaagatagtaattatttatttagtatatattgattgttgggttttgtttaagtgttttatttattgaagtttgataataattttatgaggtagatatgattatgattattatatttaatagagaggttaagtaatttatgttaagttatatagtaagtaagaaaggagttggaatttaaatttaggtagtttggatttagaatttttgttttttttttttttttttgagatggagttttgttgggattataggtgtatgttattatgtttggttaatttttgtatttttagtagagattaggttttgttatgttggttaggttggttttgaatttttgattttaggtgatttgtttgttttggttttttaaagtgttgggattataagttaatgagtttggtttagaatttttgtttttgattattatgttatattgttttatgattttgttatatgtaagatgggttgttatttatgttttggtttttttattttagtagagttagaggggtgtttatggatttgataatgtgttttatgttttatgtgagtgtttaattgggttttagtttagagaatagtaggaaaatggttttttttttttttgatttggattgaagatttgtttgatgaattaggtttattgatagtagggttgaagttggaaatataggttagtggggttttttgaaatattagagtaaatgttttttgtttatttttataggttgaggggtttttatttgtttattttttggattaggtaaatttaggagaatggttttttgtggttgtttggggggtttttagttgtaaggtttgggtttataggaggtaggtagttgtgtggtgttggaatgattttgtggggagataaattagtttgattttgttttgttgtttaaagtaaatatggggtggggtggggtggtttaggtttataattttagtattttgggaggtaggattggggaattgtttgagtttaggagtttgagattagtttgagttatatagtgagattttttttttttataaaaaataaataaaattagttgggtgtggtggtgtgtgtttgtagttttagttatgtgggaggttgaggtaggaggattatttgggtttaggagattgaggttttagtgagttaagattatattattgtattttagtttgggtaatagagtaatattgtgttttaaaaaaatattaataaagtaaatatgagttttttttttggttgtttggtgttgagtggaaagaaaggtattggtgggtttagatttttttggtttatatatggatgagtaatgatttagagaggttaagtgattttaatattatagagtatattggtgttagaattgggattggaatttagtttttgtaattgttagttttatgtttttttttttagatattagagggtaggggtaggttttaaaatgtttgagatttttagttgttttgtggtttaaatttttggttttgttttgttttagatagtttgtttttagtgttttgatttttgattattgtttgtgtatgttaggttttgtatttgttaggtgggagtttaaggattattgttgttagataataatagttaggagtttagggatttttggatgaaaggtgttagagataagttgttagtgatgtatgaggatttggataaggttttggagtgaggtggtaatgttgggtatggtggtagattatgtttaatatgggggaagggagtgtatgtggtttaggtttgtgtgtgtttttgtgtgtgtgtgtaggtgagtatggtgtgtgttgggatatatttatgtgtatttttgtgtgagtgtgtaggtttatatgtgagtgtgtatatatatttgtgagagtttgtatgtatgtatatgtgtgaggtgttgatatatgtttatgtaggtattagtttgtttgtaaatatttttgtgtaataataataaagtttgaatagttattaagagtatagatatgaagttagattgtttgggttaaatttttagttagttagttttttggtgtttttgtttttttttttgtaaaatggtgtttattttattaggattttaaaattagttaatatggttgggtgtttgtaattttagtattttgggaggttgaggtaggtggattataaggttaggagattgagattattttgtttaatatggagaattttgagaattgtttaaatttaggaggtggaggttgtggtgagtagagattgtattattgtattttagtttgggtaatagagttagattttattttaaaaaagaaaaataaaaaataaaaaaattatgaatttatttttaggttgaggagtttagtattttggttgtgaaatattttttttataaaattttgggatggagattatggggattaggtgtttttttgtgataatttttgggtatggtggtttagggtgtaaattggagtgtggttataatatatattgtgtatttttataaggatgttatagagtttgggtattataaaagaggagttttttaaggaattgaaattattagataggagagagagttttgggtagatagggttgtttgtgttaaatattttagttgtggtataagggaaagggtgggagttatgaaattgttttattttgggtttaggtttgggttttgttgttagttagttaagtgattttggttatttatttttgtggttttttatgagtaaaaggtggaaatttatttttatttagagggtaggtttgattttttttaattagtatttatttgtttatagtaggaaggattgaggtttaaagttggaggtgggtaggaaggattgaggtttaaagttggaggtgggtaggaaggattaaggtttaaagttggaggtgggtaggaaggattgaggtttaaagttggaggtggttgtttagagttttagtagaggtttttggggtattttattgagtgtttggtaggagtgggtgtttgttttagggttgggttgagttgtttttattaggattttttgttatttgtatagtgaggggattgggaggtttagagagttatagtttgggtttaaaataagtaagaggtttttgagtgtgaggattgttttggagtggaatggtttttataggtaggagtgagttttttgtagttagaggtatttaagtagttgaaggataatttttgggtaggaagttgtagagatggttgtagtgtggattagaattgttgttttggttatttagattttattttagtttggtttttttggatagtatttttgtaatagtgagttggtgattttatgttttagaattttggtttttatatttgtaaaatgggaattatatgatatttattatgtgttagatattttgttggtatatagtatatattattttatttaattttttaagtagggataagttatttttattttttatatgaggaagttgaggtatagagaggtgaagtgaatggtttaaggttatatagttgggaagatagggagttaaatttgaattttagtttggttgtttttagattttatattgtattttttatgttgattttagttttttttgtgtttatagg

SEQ ID NO: 372 - DNA, 11222 bp, Artificial Sequence
  chemically treated genomic DNA (Homo sapiens)
tttgtgggtatagggaaggttggagttggtatgggaggtgtggtgtgaggtttgggggtagttagattagagtttaagtttagttttttgtttttttagttgtgtgattttgggttatttattttatttttttgtgttttagtttttttatataagggatggggataatttgtttttatttgaaggattaagtgagatagtgtgtgttatgtattaatagggtgtttggtatatagtgagtgttatataatttttattttatagatgtggaaattgaggttttgaggtgtaaagttattagtttattattgtaggggtgttgtttagagaagttaggttggaatgaggtttgagtgattaaaatagtagttttagtttatgttgtgattatttttgtagttttttgtttagggattgttttttagttgtttaaatatttttagttataggaggtttatttttatttgtgagggttattttattttagagtaatttttatatttagaaattttttgtttgttttgagtttaagttgtgattttttgaattttttagtttttttattgtgtagatgatgaagggttttggtgggagtaatttaatttagttttgagataggtatttatttttgttaggtatttagtgaggtgttttagaggtttttgttgggattttgagtagttatttttagttttagattttggttttttttgtttatttttaattttagattttggttttttttgtttatttttagttttagattttagttttttttgtttatttttagttttagattttagttttttttgttgtgagtaggtgggtgttggttaaagggagttagatttgttttttgggtaggagtgagtttttgttttttatttatggaagattatagagataagtggttaaggttatttggttagttagtggtagagtttagatttaaatttaaaatggaatagttttataatttttatttttttttttgtgttatagttgaaatgtttggtatgggtaattttgtttgtttagggtttttttttttgtttaatggttttagttttttgaaaagttttttttttatgatatttaggttttgtgatatttttgtaaaagtatatagtatgtattgtggttatattttagtttgtgttttgagttattatgtttagaagttgttataaggaagtatttgatttttgtagtttttattttagggttttatgaggagggtattttataattaggatgttgagttttttaatttgaaaatgagtttatggtttttttgttttttgttttttttttttgagatggaatttggttttgttgtttaggttggagtgtagtggtgtaatttttgtttattgtaatttttattttttgggtttgagtaatttttagaattttttatgttaggtaggatggttttgattttttgattttgtgatttgtttgttttagttttttaaagtgttgggattataggtgtttagttatattaattgattttaaaattttgatggggtagatgttattttgtagaggaagaaatagaggtattgaaagattaattagttggggatttaatttaggtagtttggttttatgtttatatttttgatgattatttggattttgttattgttatatagagatatttataggtaaattgatatttatatggatatgtattaatattttatatgtgtatatgtatgtaggtttttatagatgtgtgtgtatatttatatatgggtttgtatatttatatagaggtatatataaatatattttagtatatgttatatttatttgtatatatatatagagatatgtataagtttgaattatatatattttttttttttatgttgggtatggtttgttgttgtgtttaatattgttattttgttttaggattttatttaaatttttgtgtgttattgatggtttgtttttgatattttttatttaagggtttttgagtttttgattattattatttggtgataatgatttttgaatttttgtttgatagatgtaagatttggtatgtataggtgatggttagaggttaggatgttgaaagtagattgtttgaggtagagtagggttaagaatttgggttataaggtagttgggggttttagatattttggggtttgtttttgttttttgatatttagggaagagaatatgggattgatagttatggaagttgagttttggttttagttttggtgttaatgtgttttgtgatgttgaagttatttagtttttttggattattgtttatttatatgtaaattaaaagggtttagatttgttaatgtttttttttttatttaatattagatagttagggagagagtttatatttattttattaatatttttttgagatatggtattgttttgttgtttaggttggagtgtagtggtgtgattttggtttattggagttttaattttttgggtttaagtgatttttttattttagttttttgtgtagttgggattataggtatatattattatgtttagttaattttgtttattttttgtagagaaggggggttttattatgtggtttaggttggttttgaatttttggatttaagtgattttttgattttgttttttaaagtgttgggattataggtttgagttattttattttattttatatttattttaaatagtagagtagaattgggttaatttgtttttttgtaagattattttggtattatatagttgtttgttttttgtgggtttaggttttgtagttaggagttttttaggtagttatagaaggttatttttttggatttgtttgatttggaaaatgaatagatgaaagttttttagtttgtggaaatggatggagggtgtttgttttagtattttagaaagttttgttggtttgtgtttttagttttaattttgttgttagtgggtttggtttattagatagatttttagtttaagttagagagaagggaggttatttttttgttgttttttgaattgaggtttaattggatatttatatggaatatggagtatattgttagatttatgaatatttttttggttttattagaataaaagaattagagtgtgggtggtagtttgttttgtgtgtggtaaggttatggggtagtatagtatagtggttaagagtaaggattttgggttgggtttattggtttgtaattttagtattttgggaggttaaggtgggtagattatttgaggttaggagtttgagattagtttggttaatatggtgaaatttagtttttattaaaaatataaaaattagttaggtatggtggtatgtatttgtaattttagtaagattttattttaaaaaaaaaaaaaaggagtaaggattttggatttaagttgtttgaatttgaattttagttttttttttatttgttgtgtgatttggtgtaagttatttaatttttttgttaaatgtggtgattataattatatttattttataagattgttgttaggttttagtgagtgaaatatttaaatagagtttagtaattagtatgtgttgaataaatggttgttgttttttttttttttattatttttattattattattattattattattattattattattatttaggaatttttggttttgtttgtggttgttattaattggtggagatttttaggtttagtttttttttgtaatgagaagtagtgattattattggtgatttttaaatattttatgattttgaaattttttgttttttttgttttttaaaatagttaaagtaaataaaataaaaaaggtttgagtaaagaaaggaaaaataggggtgtggagtttatttagtagtttttttttttttgaagttttatttttggagttagaatttttaagtgattttttagtttttgtgttttagaattttatgtttgtgtatgtgtagtgaaggttttagtgttttatagattgggttttatggaatttgtttttttttataattagaagattggagatataattttttaaggttagttagaaaatttagagttagtatttagaataaagttaagatgttaatttttatgggtggtatttgtagttttgggtatgagttttttttattttgtttttagggaggttattttttttgtattttaaatattgagagggtagaattagttggtatagtttttgtatgttttataatttaagatgtgatagggtattaggtttttgggattttttagggattagtaattttaggtattatgttttatttttggtttttggtttttggtaaatttttgtgattttttttgatgatgtaatattttgagttttttttaagatgtataagttattgttttaggtttggtagtttttaaattattttggaaagatttttgttttgtaaattttggttttttatttttatgtttgattgttttgtttttttgttaaaggtaaaagtgtattaaggatttagagaattttagggtatgagtgtgggatgggattttggagattatggaagataatttttttgtttaattagtagagaaataaggtttagaggtggagagatttgtttaaggttatatggtatatttgtggtttaggagttgatgttaatttgtgtgtgtgtgttggttgggggagtattttgtgtaatttaatagggtttgttgtagttagatgatagggataggagaagaaagatataaatatattatgatgttattatagttaatagaaaatttaattttttttttttaagtgtttttagtatggattattaatggtttaaattttagataatggagtttttaggattagttatgtttttgaggtagatggaagttggaaatgggtaaagtttaagggagatttaaaggatgatggagtggaagaggaaaattggttttggtttataaataaggagaaattaatttgtaaattaaagtgttaaagataatttatttatttgtggtaattttggtgtttatttttttttttttgttggtagaaatgttgatttttaatttattagatttttgagggaattagtttagaatggtgagggaaggggttaagagaagagtgtattatttttgggatagaaggtaatgaggagatgagtttttatgtataaattatagttattttttatttataaattttagaattttgttttttttggtgtattttggaattttttgtggtagaaggtaggatatatttgtagattatattatttagattttttaaattagagatatatttaatattgaaggttattaatgagtttttattttttgttttttaattgtaatgttttgaaaggtttttagtttgggttttattagtaatagttattaatatttttaggatttagtatatgttaggaattatgttaggttttttgtatgtattattttatttaatttttatattttttttaggatatagatattaggatatttttttattgtataggagaggaaattgaggttttgagaggttgagtatttttttaaaggttatttagtggtttagtggtagagttaagtttagaattagatttgtttttttttgaagagtatgttttaattttgatattttaagagtatttaatgagttgtgattttggaaatgtttttttttttttagtttttttttgtttttattttgtaagagaggtggttgtataaaattttttaggatttttgttaattttgattgtttataattttaaaattttttttggtggattttgagtattttaggtttgatttttatgttttttttagttgttgatattagtttgaaatggttttttttttttttttgagtttaatttttgatatttaaaagtaaagaaaaagtaagtgattgttttaatatttttaattaatgtagttaattgatttattttatgtgtaaattttttattttgtagttgaatatttttgattttagggtgtgggtggtaggggtaatggaattttttttttttatttgatgaggattttttgtttatggtttgggatgttagtttttatttttttttagatgtttagtattaattgttattttttgttgttgagttttatggtgtagtttgaagaagataaaaagagtaagtatgggtttattgggtgttttggttttaatagttggggtttgaggttgtttggttttaagggtgtttttatattttttgggatgtttgataaagattgtttaatggtttgttgttttttttttttgtttttttttatttttttttttttatttagggagggtttaatttttttttttttttagtttttatatgggaagttattttagggtaggtgttattgtggtgaggtaggatagtttaggttatagggggtggggtggttgtgtgtgtggaaagaaggggaggaggttgggtattgtttggatttttatagttgatagaaagggtattatagaagttgatgttagtagtttgaaatttaatgttttttgtggttagtttttttaagaggatttgttatgtttttaagtttggttattaggtgttttggttggttttaggatagttttggttatttgtaattttttatgtattttttgtttttttgttagagattttttatttagttagaagtgatagaaaggaattggatggttttgtgtttatagttaggtggttttaggtaagtttataattttttagagaatttttgtttttatgattttgtttaaaggtttttttttgaaaagttttttttgatatatttttttgagatattattaattgttttttttttttttttttttgtgtaagtttttgttgtattgttttttaaagggtattttattttttggtttttatgttattttttttattaggataatagtagttagtatttataagagattttgttgggtgttaggttttgttttaaatatttggtatttggtaatttatttaatttttgtaagattttttaatgtgataggtattgatattatttttatttaattgagagaaagtagggaaatattattgatgtataattagttgttggtagagttgggatttgaatttaggaagttatgtttttttttttgtagtttttaggagggtaggagttttgttttattaatttatgtattttttgggttttatatggtgttttgtgttaagtttgaattgaataaatgtttattgagtaaatgggtggatggttttgtaaagaaagagagtggaggatgattagttttattttatatttatgtatttttttttaatttatttaggtatttaattatttatttatttatttatttgtttatttagttatttatttatttatttatttgttattttttaatttatttatttattatttttttgtttatttatgtatttatttatttatttatttattatttatttatttaatatttattaatttttttatttatttgatattttttaatttatttatttatttatttattatttttttgtttatttaggtatttatttatttatttatttatttatttatttaaaatttattagtttttttatttatttatttatttatttatttatgtgtttatttatttattttttaatttatttatttatttattatttttttatttatttatttatttatttttttatttatttatttattatttttttatttattatttttttttttatttatttatttatttattatttatttatttttttatttatttatttgtttttttatttttttatttatttatttatttatttttttatttatttatttattatttttttatttattattttttttttatttatttatttatttattatttatttatttttttatttatttttttatttatttgtaattttatttatttatttattttttttatagtgatagagtatttattgtgtgttagatattgttatatgttgaggataataaaattaaataaaatatttttttgtgtttaaggaatttagagtttttttagggagataattaagaggaatgaaaatatagtatagtttgtttagtgttatgattaaggtaggtataggtttttttttttatttgtataagattatatagtttataaagtggttgtttggtaagattatatttaatttttataatatttttgtgaggtagtgagtattattttgttttatagttgtgggagatgagatttagaaaggataagttagtgtttgggttattttgggtttgtattggatttgttagtaatgattgttttatttatatagttttttgaagataattgttttgttttaattttgttgaggtgtaggtgtagttagttatgttttgggatatatagtttttttgtaaatttgttgttagttatagttaagttgagaaagttaatgttagggttttatttgaatagttagtatttattagttttgttagttagattttagttttagaatgtgaatagagatgtttggtaagaattggataaataataggaaatgtagttagaaaaagagttaaatttaaagaatttttaaatttggagttttttagtgtaattttgggttagaatgttttttgtgtgggtttttaaagtttggttggtgattattttaggattgttatgagttgttattttttggaggagttttgtgtttttatttagtgagttttgtgtattgagttggttgatttttagtgattaaaagggttagaggtattggttgtatttttggtgttttttttttagtgattattttagaagttaattttaaatgttaggttagttgatttttaaaggtttatttttttagtagtggaagaagtagtaataaaataagtagttaaaatgttatggggggttgggtgtggtggtttatgtttgtaattttagtaatttgggaggttgaggtgggtggattataaggttaagagattgagattattttggttaatatgtttaagttttgtttttattaaaaatataaaaattagttgggtatggtggtatgaatttgtagttttagttatttgggaggttgaggtaggagaattatttgaatttgggaggtagaggttgtagtgagttgagattgttgtattttagtttggtaatagagtgagtttttattttaaaaagaaaaaaagaagttatggggatgttaaaggggattttatttatttatttagttagttagttatttgtttgtttttttgtttatttatttatttgaaagtttattattgaggttttagtttgtgttaggtttagttttagaaggaaagataattttgagagggtttgttttggttttagatttttagtagtttgatttttattgttggttatttgttggaggtgagtttagggtgtgagagaggagggtagaaagaaggagatggtattgagttgtgttatatttgatttggggttttttgtttggtgtgttggggaaggttaagaggtagatttgagatttttggagattgagatgtaatgtgtggtttttaaatgttttttggtttgtgtttttttgagagtgttagaatatttttgagggtgtggggtagggtagggttgattattatttgaattttagttttttttttgtttttggttttttgagttgtttggggatggtttgagtatttaaaattttattaatttattattgatgttgaaatgtttaatatgaagttattatttgtttggtaagtgtttttattaattggtatgtttatggaaatttgtagttttgaagttgatggattttttaagttttattatttaagttaatgggaaggtattgatatttgtttgtatttatatatttttataatagagtagtgttattttatagttgttatggttatttggagttattagttttgtttgggggttattattatttttgtgatagtttttattatggttagggtagagaagttgtagatatatgataggaaagttaggttgtttttgtgtgtaaaattttttatagttttatatgtttatgttatatatatgtatatatatgtatgaatgtagggtatattagtttgatatttagtggggtaaaattggattttattaagttagatttttttttttttttttttatattataggattttttgaatttaaaattgagatttgtagaattatttttaaggtttttaattttggaattttgagattttagaattaaaattttagagtgttaaagtttttaattttttagtattggagaaatttgggttttagattttagatttatagagagttagaagtagagaaatttagaattatagggttatagtattttgtgattaaaagaggtttttaatggtattttgtttaattttttattaaatatagttttttttatagattattatttggtatttgtttgaatatttttgggagtggtgagtttattatttaaagttttaaaaatttttttttatgttgaattaaaagatgtttttatgttatgtgtatttttttgtggtagttttgtttgttttttggggatatagaggtttagttgagtttgttttataagagaaggagtaggtttatttaagattttttttgtttagattgaatattttaggatttttattgagtattttttttaggtaaggtaagttgggggttttagtttggtggagaaagatgggttttgttatttttggtttttagttatttttatttttggttatatgtatataaagagaatgttatagtaaaggggattttagtatttatttgtataggtttgagttttttaggtagttgtgtatttggtttatagtttttatggttagaaaatttaatttaggtgatttaggaatttgttagtttttggatagttgataattttttttggtaaatttgggtttaagatattattaagggagattaaagatgtggtaagaaggagaattttggttttttaaagttaggattttttatgatttttattatttttttttttttttttttgggaattagtttttggaggttagtttgggtagtgttttttttttgttagtaggtttttttattttatttttagtttagtttgtgtttttttggtagagtttatttttttggattagtgttaggtt

SEQ ID NO: 373 - DNA, 5952 bp, Artificial Sequence
  chemically treated genomic DNA (Homo sapiens)
atatttttgatttttatatgagtatatgtttgagtagtttggattataggtgtgtagtattatatttagttaatttttaaatttttgtgtagtgatgaagttttattttattgtttaggttggttttaaatttttgggtttgagtaatttttttatataggttttttaaagttttgggattataggtatgagttatagtatttgagtaagatgattttttaagataggtgaagatgttagtgtttagaattttatttttaggggtatgtaggtatgaaaggttatatttaagtgagtgttatgttagtttttttagaaatttagttgtttttttttaaatttagtttaataaaaggaggtttggagaattaatgtatataagttagaattatagaatgtatagtatgattattaggatggataatatgtggtttgaataaattttttatttattatatttagtttttttaggttaatggaatttagattaagtatatttttgaagttagtattgtgtgatgaataggggtttggtggaagtgatgttaatagggttttaggttagttttagagtttttttttttttttttttttgttttttgttttttttttgtttgttttttgttttttttttttagatagttttttttttgttgtttaggttggagtgtaatggtgtgattttggtttattgtaatttttgttttttaggtttaagtaatttttttgttttagttttttgagtagttgggattataggtgtttgttattatagttggttaatttttgtatttttagtagagataggggttttaggttaggttggttttgaatttttgattttaggtgatttgtttatttgggttttttaaagtgttgggattataggtattagttattgtatttggtttaagaaatatttttaagtatgtttgattttggtaaatgtttttgattttttttgtaggaaaaaattttagagattgaatttttgtgttaaagaataagtaaaattttaaggtttttgatatatatttttaagtttttattagaaaaattatattaatgtatatttttatttgtaatgtatttaagtgtttatttttttgaattttttttaatatattaggtgttaatatgatttttattaatttggtaggttaaaattttgtttttattgaatttatatttttttgtttattaatgtggttaataaattttatgtttatgaagattaggattggatagtggaggttagatatttttggttttttgtttagatgaataaattttttattttttttaatttatttaagttgagttttttgttattgaaatttaaattatattaattaatataattttttgaggtatattgaagttttaaaatttgtatggttatttattatgttttatgggttttttttttatgtttggaagtttataggaagattttataaatatttattaaaatatttttttattttttattgggttaagatttgaatttgaattttttatttagaatttagtgaataattattaggaaaagtttttttttttttttttgagatggaggtttgttttgttatttaggttggagtatagtggtgtaattttggtttattgtaatttttgttttttgggtttaagtaatttttttgtgttagtttttttagtatttggaattataggtgtgtattattatgtttagttaatttttgtatttttagtagagatggggttttattatgttggtttggttggttttgaatttttgattttagatgatttatttattttagttttttaaagttttgggattataggtatgagttattgtgtttatttagaaaagtttatagtttttatttttttttaatagtttaattaattatttgattaaaatttattttatttttttttttattgatttaatagtatttttattagatgttagagtagttatttaaaatgtaaattggattatattaaagatttgttgttgattatatttttttgtatttttagagagtttataaagttttgtaagagtttattttagtttttttgtaattttattttgtattatttttgttttagatatattagtttgagttttatattaaatttgtttgaatatattttaagtatgttgatttttataattatgttatttttttagtttagaatgtttttttttaattttttaagtagttgttttttttgataagatgttatttttttagagaggttttttttgattatagttataggtatgtttatgtttttattttagtttaatataaaatttatgtaattgtatatttttttattatttgatatttttaggaggatattatttttgtaatagagtagaaataaatagattgatgtatatggtggattttttatggatagagtttgttatttaaaatgtttttaaatttattatatgtaatttggtattaaattaaaatgttattatgtaagtgaatgtttttaaagtttaaaagtttttttaaaataaaatagatttgggtgtggtggtttatgtttgtaattttagtattttgggaggttaaggtaggtagattatatgaggttaggagtttaagattaatttggttaatatggtaaaattttgtttttattaaaaatataaaaattagttaggtgtgatggtgtatgtttgtaattttagttatttaggaggttgaggtatgagaattgtttgaatttaggaggtggagattgtggttagttaagattatattattgtattttagtttgggtgatagagtgagattttgttttagaaaaaaaaaaaagaaaaagaaaaagaaaaaaaaaaagaaattttaagtgataaagtattgtgtaatagtttgaggttgggtatagtggtttatgtttgtaattttatattttgggagattgattgggaagattgtttgagtttaggagttggagattagttagagtgatatagtgggattttttttttataaaaatatttaaaaattagttaggtatagtggtgtatttttgtagttttagttatttgggaggtggtaagaggattttttgagtttagaagttggaggtggtagtgagtagttattttgttattgtattttagtttgggtgttaaagggagatttttttttttagaaaataataaaaaaaaaagtttgatagtttttttgtttgtgttatataaaataatggtatatattataattgaaggtattttataatagaaatgtttttttttgtttttttttaaggttgatttagtgttttaagaggttgatatagaagggtaaagttaagtttttataaaatttagggaagagattgtgaaatttattttagaattttgtatggagttatagttgaattaggaaaaaaaaaaaaaaaaaaaaaaggaaagaaaggtattttagagataaagaatagattaaggagaggagatatttgaagttataatgattgagaatatgttagatttgaaatgaatttttagtttttttaataagataaataaaattaattttatatttagatatatggtagaaaaattaaagaattttgttgattaaggtattaaaagtaattaaagagaagtggtgtgaagaaagtaagagagaaataataaattttgtttattttgtaataattgaaaatttttggttgggtgtggtggtttatgtttgtaattttagtattttgagaggttgaggtaggtggattattttaggttaggtgtttaagattagtttggttaatatggtgaaattttgtttttattaaaaaaaaataataataataatataaaaattagttgggggtggtggtaggtatttgtaattttagatatttgggaggttgaggtaggagatttatttgaatttgggaggtggaggttgtaatgagttgagattgtgttattgtattttagtttggatgatagagtaggattttattttaaaaagaaaggaaaagaaaagaaaaaatattaaatgtgtatgttttttgatttagttgtattattttaaggagttgatattattaaaattgtttaagtgtttaaaggtgtttgtagttaaataataggagattgataaattatgttatatatatgtgatgttatgttttaaagaggtattgatatgataaaagatgtatgtggtataaaattaaatgtattttattaagtatttttttaagtgtttatggaatgagtgtatttttgaaaaaaaaaaagtgtatttgaatttttaaaaaagttttaaaagttttatataatgaatgattgagtgattataagagttggtgggggaatgttaagaggatgatagggagttaagtttaatagaataatttatttttttattttgtgatatttatgagtgtattaattttgtaattgaaaaataaagtgtatatttgtagtagttgtattttttttaggttgtaaggaggtttttttttttggtaggtttgatttgtattttatttttatttttgtggttggaaattttttatttatgtagtgggaggttgaggagttattataaagttggggtttgatgagttgggattgggatttgatttttatatatgtttggatttgttttgtggttgggtttaggagttaaagaggtggggagatttgtgtgatgttgttttgttttgtgtttgttttttttaatgtatgttttagggggtgggttttgtggggagtatggatatgattggttttaaagttttttttgtaaggttgtgggttggatagtgtggtgatgttgtaatgtggtgtagggtgagagtgtgtgtttgtggatgtggtggtattaaatggttgtaggtgtagtagagtggttgttgtttttttaggttttagttggttgttgtgatgtttgtttgtttgttttgaggtttttgaagttgaaattagttagattttttttttttttgtttgtttgtagtggtgttgttgttattttgttattatgtttgaggtgtgtttggtttagggttttatttttaagaaaggtgttggaggtatttaaggattttattaatgaggtttgttgggatattagttttagtggtgtaaatttgtagagtatggatttgttttatgtttttttggtgtagtttattttgtggtttgagggttttgatatttattgttgtgattgtaatttggttatgggtgtgaattttattaggtgagttttgtggttttgggaagttggttttggtttgtttgtatttttggtgtttggtgggagtgtttttgagtttagtttttattggttggtgtgggttatttgtgtttttttattggtttgttatgtagtggggtggggtttagttgagtgtgtggtttggaaaagtttgtgttggttgttgtgtgaatttgtttttttgtgttaaagttataaagtgggtggtggtgggaaaattaagggtttttttgtagtgttaggaatattgttttagggttttttgtttattaaattttgttggttttgaatggatgttttagttgtggtttttttgtttttgagatggttttggtgtgttgtttgggttggtttttaatttttgggtttaagtgatttttttggtttagttgtggttgattttaaatgttttataatgtttttgtgagaaatgtggtagtttgttattttatttagtggtaggagattgtttttatttagaagggatattgttggtggtattttagtataaatattgttagatgtgttttaaaatgtttgtattaataatggtattttttagtagtttgtttattttttattagttttgagatggtttgatgggtgagagtggtaattttttttaattgtgtttgaaatatagttttttagtagatggtgttgattttaaagtatgtgttttttgttttttagt

SEQ ID NO: 374 - DNA, 5952 bp, Artificial Sequence
  chemically treated genomic DNA (Homo sapiens)
attagaagataggagatatatgttttaaaattaatgttgtttgttgaagggttgtattttgaatgtggttagaaggggttattatttttatttattaggttgttttagaattggtggagggtaagtggattgttggaggatgttattattaatgtagatgttttgggatgtatttggtagtatttatattaaaatattattagtagtgttttttttggatagaaataattttttgttattaagtaggatgataggttgttatattttttgtaagggtattataaagtatttaaagttaattgtgattgagttgggaggattgtttgagtttagaagttggagattagtttgggtaatatattgagattgttttagaaataagaaagttatagttaaagtgtttatttaaggttaataggatttagtgagtaaagagttttggaatagtgtttttggtattgtggaaaaatttttgatttttttgttattatttgttttgtgattttggtgtgaaaaagtaggtttgtgtagtagttagtgtgggtttttttgaattgtgtgtttagttgggttttattttattgtgtggtaggttaatgagaaggtgtggatggtttatgttagttaatgagggttaggtttgaaagtgtttttgttaagtattggaggtgtaggtgggttggggttggttttttggggttgtgaggtttatttggtgaggtttatgtttatggttaggttgtggttgtagtggtaggtgttgaagtttttagattgtagggtgagttgtattaaagagatgtgggatgagtttatgttttgtaggtttatattgttggagttaatattttagtaggttttgttgatgaggtttttgagtgtttttaatattttttttgaggatggagttttggattaggtgtgttttgaatatggtggtggagtggtaataatgttgttataggtaggtgggaaggaggaaagtttagttggttttggttttaggagttttagagtgagtgggtgaatgttgtgatgattggttgagatttagaaagataatgattattttgttatgtttgtaattgtttaatgttgttgtgtttgtaagtgtgtgtttttattttgtgttgtgttgtgatgttattatgttgtttagtttatggttttgtggggaagattttagggttaattgtgtttatgttttttgtgaggtttgttttttagagtatatattggaggaagtgggtgtagggtggggtagtgttgtgtaggtttttttgtttttttgatttttgaatttggttgtagaataagtttgggtatatgtggagattgggttttggttttggtttgttaagttttagttttatggtggttttttagttttttattatgtgggtagaaagtttttagttatgaaagtgaaagtgaaatgtaaattaagtttattgggaggaaaagtttttttgtagtttgaagagagtatagttgttgtaaatatgtattttattttttaattatagaattgatgtgtttgtaggtgttataagataaagaggtgaattgttttgttaaatttagttttttattatttttttaatatttttttgttagtttttataattatttaattgtttattgtataaagtttttaaagtttttttaaaagtttgaatatatttttttttttttaaaaatgtatttattttgtaaatatttggaaaagtatttaataaagtatatttaattttatgttatgtatattttttattatattagtatttttttaaaatatagtattatatgtatataatataatttattaattttttgttgtttaattataaatatttttgagtatttaggtaattttggtgatattaattttttgaagtaatatagttgagttaaagagtgtatatatttaatatttttttttttttttttttttttttttgagatggagttttgttttgttatttaggttggagtatagtggtgtgattttagtttattgtaatttttgttttttaggtttaagtgagttttttgttttagttttttgagtatttgggattataggtgtttattattatttttggttaatttttgtattattattattatttttttttagtagagatggggttttattatgttggttaggttggttttgaatatttgatttgaggtgatttatttgttttggttttttaaagtgttgggattataggtgtgagttattatgtttagttagaaatttttaattgttataggatggataggatttgttgttttttttttgttttttttatattatttttttttagttatttttaatattttggttagtagaattttttagtttttttattatgtatttaggtatggagttagttttatttgttttgttgagggaattgaagatttattttaagtttgatatatttttaattattatggttttaaatattttttttttttagtttattttttatttttggaatgttttttttttttttttttttttttttttttttttttagtttagttgtgattttatataaggttttaagatgagttttatagttttttttttggattttgtggagatttaattttatttttttgtattagttttttaaagtattgggttagttttaaaagggaataggaaagggtatttttattataagatgtttttaattgtaatatgtattattattttatgtagtataagtaagaaaattgttaaatttttttttttattattttttagagaggggagtttttttttgatatttaggttggagtgtagtggtaagatgattatttattgttatttttaatttttaggtttgagagatttttttgttattttttaaatagttgggattataggggtgtattattgtatttggttaatttttaaatgtttttgtagagagaaggttttattatgttgttttggttggtttttaatttttgggtttaagtaatttttttaattggttttttaaagtgtgagattataggtatgagttattgtgtttagttttaaattgttatataatgttttattatttagaattttttttttttttttttttttttttttttttttttttttttgagatagagttttattttattatttaggttggagtgtagtggtgtgattttggttaattgtaatttttgttttttgggtttaagtaatttttatgttttagttttttgaatagttaggattataggtatgtgttattatatttggttaatttttgtatttttagtagagatggggttttgttatgttggttaggttggttttgaatttttgattttatgtgatttgtttgttttggttttttaaagtgttgggattataggtatgagttattgtgtttgggtttattttgttttaaaagaatttttagattttaaaaatatttgtttatataataatattttggtttaatgttaaattatatgtaatagatttgaagatattttaaatgataaattttatttatgggggatttattatgtatattaatttgtttatttttgttttattatagaagtgatgtttttttaaaagtgttaaatgataaagaggtgtatagttatgtaaattttatgttaaattgaaatgaggatataaatatgtttatgattgtggttagagaaggtttttttgaggaggtagtattttattagagaagatagttgtttggagagttggaaaaaagtattttaggttgagagaatagtatgattataaaggttagtatatttggaatatatttagataagtttgatgtagaatttagattgatgtgtttgaagtaagagtggtgtaaggtgaggttgtagagaggttggggtgagtttttgtaggattttgtaggttttttaaaagtgtaagggaatgtggttaatagtagatttttgatgtgatttaatttatattttaagtggttattttaatatttagtaaaggtattattggattagtgggagaaagaatgaagtaaattttgattagataattggttaaattattagaaaagaataaaagttgtagatttttttggatgggtgtagtggtttatgtttgtaattttagaattttgggaggttgaggtaggtggattatttgaggttaggagtttgagattagttaggttaatatggtgaaattttgtttttattaaaaatataaaaattagttgggtgtggtggtgtatatttgtaattttagatattagggaggttgatgtaggagaattgtttgaatttgggaggtagaggttgtagtgaattaagattgtgttattgtattttagtttgggtgatagagtaaatttttattttaaaaaaaaaaaaaaagattttttttaataattatttattaaattttagataaagaatttaaatttaaattttgatttaataagaaatggaaaaatattttggtaaatatttatgagatttttttatgggtttttaaatataagaaaaaaatttataaaatataatgaataattatataagttttaagattttagtatgttttaaaggattatattggttagtatagtttaggttttagtgatagagaatttaatttgaatggattaagagaaatagaaaatttatttatttaaataaaaagttagaggtatttggtttttattgtttagttttagtttttataaatgtgaagtttgttagttatattaataagtaaagaaatgtaaatttaatggagatagaattttaatttattaaattaataaaaattatgttaatatttggtgtgttaggaaggatttaaggaagtaggtatttaaatatattgtaagtgggagtatatattggtataatttttttggtggaaatttagaaatgtgtattaaaagttttagaattttatttattttttgatatagaaatttgatttttagggtttttttttatagaagaaattaggggtatttattaagattaagtatgtttaagaatgttttttgagttaggtgtagtggttgatgtttgtaattttagtattttgggaggtttaggtgggtggattatttgaggttaagaatttaaaattagtttgatttaaaatttttgtttttattaaaaatataaaaattagttagttgtggtggtgggtgtttgtagttttagttatttgggaggttgagataggagaattgtttgaatttgggaggtggaggttgtagtgagttgagattatattattgtattttagtttgagtaataagagggaaattgtttaaaaaaaaaaaataaaaaataaataaaaagaaaataaaaaatgaaaagagagagagagaagggttttaaagttggtttaaagttttattagtattatttttattagatttttgtttgttatatagtattgattttaggaatatatttgatttgagttttattaatttgagagggttgagtgtaatggatgagaagtttgtttagattatatgttatttattttagtaattatattgtgtattttataattttgatttatgtgtattgattttttaagtttttttttattaggttggatttgaaaaggagtagttgagtttttagaaggattgatatgatatttatttagatatgattttttatatttatgtgtttttgaaggtgaagttttagatattaatatttttatttgttttagaagattattttgtttgagtgttgtggtttatgtttgtaattttagaattttaggaggtttatgtgggaggattgtttgagtttaggagtttaagattagtttaagtaataaagtgagattttattgttatataaaaatttaaaagttagttgggtgtggtgttgtatatttgtagtttaagttatttgggtatatatttatatagaaattaggaatat

SEQ ID NO: 375 - DNA, 6664 bp, Artificial Sequence
  chemically treated genomic DNA (Homo sapiens)
tattataagggtattaattttattaatgagggaaaagtttttgaggtttaataattattttttgaaggttttattttttaatattattattttggggtttaagttttaatatatgtatttaggaggggtatatatttttaaattatagtaatttgtaagtgatatatattttaggttttatggaatttatatttatttttggttatatttagttatgtggatgttttatagtattttattattaatatgtttaaagtgatgttttatgttttatagttgttttttagtatttttttagaatagtaggatttttagtttgttgtaaagttatatatttaagttatttttgatgatttttttttttttttttaatttagttttagtttttaaaaatattttattgttattttttttttttgaaattgatatttttttaagtttagtatttgttgggattgttgtagagttttttattgtttgttggttttgatgttgtattattagttttttttatgattttttttttttaatttttatttatgattatgttattgttttgtttatatttttttgtttaagtttaatgtttaatttaaaatttttagtatgattttgaatattatttttaaggtatagatattatttaattatttagtttaatgtttatgatttttgttgagtatttagattttgtttatgtttagtgtattgaattaattttagtttataaatttgtattgtttttttttgttaatggattaagttttttatttttatttgtttttttggtaaattttttttattttttaagatttagtttagttaattttgttatgaagttttgtttgatgttttttttattatgttttgtatatagtagtttttattatattgtattgtaaatatttgtattttatttaggtggaagatttatagttatttatttgttatttttgatttttattagttttaaggttgatatatgaattttttttttttatattatgtttagtttttaaaattttaatgagagattaaggtgggttgatatgtatgtatttaaagtataattattaataggtttaaagtgatttttttttttttttgtggggtgagaatgaagatagggggtatggaggttgtatatgataaatttttattatttgtattttatattttggattattttttaaaatttatagaaaaattatattatttttataattagaaaaatatttaattttgttatagtaatgatagtttagtatttttatttgtggtgaaaagatttgaatttatatattttgtattttttgttatttttttttttgaattaatatgaaaaaggataaattttttttttttgtatatattttttggtaatttttaaattttttttttttttttatatatttgtttgtatagagatagggttttattatgttgttaagttggttttaaatttttggttttaagggattttttattttggttttttaaagtgttgggattataggtgtgagttattgtgtttggttaatttttattatttttatttagtagtaatggaggttttggtaagattgatttatttatttatttatttatttgtttatttttgggttagggtagtatatttatgtggtttaatatttaaaagatataaaatttttttttttatttttgtattaggttatttttgtattttatagagggtatatttttattagttttttttattttttttttgaagtgtatttttttttttttttttttttttttagaaggagttttgttttattattaggttggagtgtagtggtgttattttggtttattgtaatatttgtttttagggtttaagtgatttttttgatttagttttttgagtagttgggattataggtatgtgttattatgtttagttaatttttgtatttttagtagagatgggtttttattatgttggttaggatggttttgattttttgataatgtgatttatttgttttggttttttagagtgttgagattataggtgtgagatattgtgtttggtttggaggtgtatttttaagtaaatgtttttatattttttttatttaaaaaaaatatttgttttgatttgggttgttataataaaatgttatagattatgtgttttaaataataaaattttatttttatttagttttggaggtttggtgtgtaagtttagagggtgggtaatattaggttttggtaagggttgatttttttattgataggtgtttttttattttaattttatatgagagtaattaagttttttagtgtttttttttataagagtattaattttattatgagggttttatttttatgtttttatttaaatttaattattttttaaagttttatttttaaatattattttagtggggtgaggtttttaatgtatgaattagtggggtggggggataataaatatttagattatagaaatatgtaaatataagaaataaaattaaaaagatttatgtgtaatattaattgatttttttttttttttttaaaatggagtttattaaaatataaatatgaagttttttagagtatatatttttttttgtttttttttgtagtttttttttttttaatattatttttagggtagtttttttaaaatatggttttaaggttgtgtgtattttttttgtttagattttttggaatagtgtttagtgtttattaggattttgattgtaaatttttttttttgattttaatattataggatgtagtattttttatattttattatggggggtattttgaattatttgggttgattttttggtttttgtgttttatttatataattttttttgtatggaaggtttattttagaattttttttttagtttttgtttaaatgttatttttgttagtattagtagtttttttttttgggtttttatattgttttgtaatataagttataaggtaagtattagaagagaatttttaattattattttgtttttttatttttaatatttttagtggtaattgtattttatttatttttgtgtttatgaagtatagtgttgtattttggagatattatatagaagttggtttaaagggtaataaattgtatttgttaagatgatagtatggatttataataatttttgaaattttataaagaaagatgattgagttaaattgatatatttagtattatagttgtggaagtttgtggttttttttatgttaaaggtaaaatggatataatgaattagttgttatttttagatgatatagaagttgaattttttttaagttttttaaagagaaagatatattaaaatttattaaaattagtattataaattgtatagaatagtttggttttttagagtatttttttggggtagtgagtttttatttaaaaaatgaagtttggattttaaatataagttttaaaagtgattaggttttagtaggagtttttaaatttttatttatattatgatttttaaatgttttgtttttgttgtttaggaataaaaattgttaaggttgagttagatgtaatgtataatattagatgatagatgtagtttattgtgttaaaaggtgttaaatatttaagtgtatgtgatatattttatattataagggtaaggaagttttattttatattttgatttgggttttttaatatatatttgtagtggatgtggtaattagtttttgttttatgttttattaggattaatgtaattagaaatttttaaaatggatttttattatgtttagttttgttttattgttttatttgtttattttaaaaagattttagaatggtgtttaggttgggttggtggtttatgtttgtaattttagtattttgggaggttaaggtaggaggattgttggagtttaggagttggagattagttagggtaatataaggagatattgtttttgtaaataaatagaaaaaaaaaaagtaagaaagaaagagagaaagaaggaaagaataagaaaaaggaaaaaaaaattaattgtagtaagtgtagaaattttttttaaggatatgatggatggtaatgaagatagagtttttgatattggattatttaaagtataatttaagtttttttttttttttttatagaattgtgaatttttgtgttttaattatatttaagttaggtgtggtggtgagtgtttgtagttgtagttgtgttggaggttgaggttgattgtttgagtttaggatttggaggttagtatgtgtaatataatgagatttagtttttaaatgtatgtttttttttatatatttaaaattttgatgtgaaaatattttaaaatttaatatattttaaatgtttttaattgtataataaataaaatgtaaataataaaataatttaatattaaatttaaaaatgaggtagaaataaagtatagtgatataaataataaatttttttttatatttttgaggtggttttttgagttttttattttttttttaaggttattgaaatgtgttttttggagttagtttgtaaattatgtatttagaaaaatataattatatatttttaattttaagtattagaagtgaaagtaatggaattttgatgtaaatataatattatttttttgatgagttattttgagtataataaatttgaattgtgttaatgttgggagaaaaaatttaaaagaagaatggagtgaatagtagttttttgttttgttgattagaaatagtaggatgatatttttttgattggaggagagtgtttgtgtttgtatttagttggtgtttgtttttttgttttttttttagttgttttttttttttttttttgtgttttagttatttgggaaggtttgtttagtgtagttgggttttgattggttgttttgaaagtttatgggttatttgattggtgaatttggggttttttagtgtggtgagtttgaaattgtttgtatttggttttaaagttggtttttggaaattgagtggagagtgatgtggttgttgtagttgttgttgtggttgttgtggaataataagttgggtatagtggttggggttagggttgtgtttaggggatggttgagggttttggagggtgagtattgaggaatggggttttttaagaaggttggattggaggttagggatttgtgtggggtttggttgggttttggggggtggtgggtagggtttttgtttgggtttggttgtgtgagttatattgggttggttttagagggaggttatgggagtttagtttggtggggttaggtggtgtgggggtgggggtttggggttgtagttatgagttgaggttggttgtttttaggaattgtttgaagaggtttttgggttttgattgaagtaaaatttgtttttttatgttgagtgtttgtggagtagtaggtttttttttgggtttggtttttgtgtgttttgttattttgttttgggggtgggaaagtgggattgtatttgggttaggtataggtgtgggtttttagagttaggttgttttgagaaattgattttggaatttgtgggtttttttgggtttgttttgtttatggttttggtttatttggagttgttaagaatagttagtttaggtatttaatttttatgagtagtgtagtgtagttttttttatttaaaaagatatatttttgtttttttttggattgatttttttttgaagatgaatgtgagaaatagaatttaaaggtttattttgagtgtgttttataaatgattttattattagtgatgggtgttagaaaaatttaggtaattatgtttggagttttgatgttttattggtaaattttagaggaagttttgaatttttggttgttagtttttttttttaatttatttattgtgatttaagtatattgtttttttgtttagtttttgatattgtttaggttataattagaattttatttgtggaattgtattttttatttttttgttttatggtgtttaagtgatattttttatttttggaaaaagtattttgaaagttttgagtatgtttgtttgtgattttagtaagtagaggaaaaagattaaaattgttatgtgggtaattgtaaatatttaaaatgtttttgttgttttaaataaaatttttttaatgaatagtttgaatatattttagttttgtttttataattttaaaaaataatgttttgaataaaattaggagtattataaagtggtataaatttgttgaaatatttgggtataattttggtatatgtaggtattattttaaagtgttataaaaagggaatataattttggtttttgtttggaaagaatagataagttgatatttgaatttgagggttattttgattggaagaagttaaatattatattagtatagaatatatatgtttttaatgttttaggagttaagaaggatggaaagttattgtaggagtttttatttttgtaaatattgtttgaatgtaattaatatttatggaatatttatgttgtagtaggtattgtggaaaatgttttatatatagtgttttattaatgtttaaaattatttgagttagtggtatgtaattaagttagttttttttttattttagg

SEQ ID NO: 376 - DNA, 6664 bp, Artificial Sequence
  chemically treated genomic DNA (Homo sapiens)
tttaaagtgaaggaaaaattgatttaattatatgttattaatttgagtagttttaagtattaatgaaatattatatgtaaagtattttttatagtgtttattgtagtataagtattttataaatattaattatatttaaataatatttataagggtaaggatttttataataattttttattttttttgatttttgagatattggaaatgtgtatattttatattagtgtagtatttagttttttttaattaaaataatttttaaatttaggtattaatttgtttattttttttaaataaaaattagaattatgttttttttttgtgatattttaaagtagtatttgtgtgtgttaaagttatatttaaatattttaataaatttatattgttttatgatatttttaattttatttaaaatattattttttaaagttatgaggatagaattaaaatgtgtttagattgtttattaggaaaattttgtttaaaatgataaaaatattttaagtgtttatagttgtttatgtgataattttaattttttttttttgtttgttgaggttatagataaatatgtttaagatttttaaggtattttttttaagagtaggaaatattatttaagtattgtaaaataaaagaatgaaaagtgtaattttatagataaaattttaattataatttaaataatgttaaggattaagtagaaaaatggtatatttgaattataatgaatgggttaaaaaaaaaagttgataattagaagtttaagattttttttgaagtttgttaatgaaatgttagaattttaggtataattatttagatttttttaatatttattattgatgataaaattatttataaagtatatttagaatagatttttaagttttattttttatatttatttttaaagaaaaattaatttagaaagaagtagagatgtatttttttaaatgaaaaaaattgtattatattgtttatgagagttaagtgtttgggttgattgtttttaatagttttaggtgggttggggttgtgggtagagtaagtttaagaaggtttatgagttttaggattggttttttagggtggtttggttttagggatttgtgtttgtatttggtttaggtgtggttttatttttttatttttgaggtgggatggtagggtgtgtaggggttgggtttaggaaagagtttgttattttgtaggtgtttagtgtgggggagtggattttgttttaattaagatttgaaagtttttttaggtagtttttgagaatagttgattttgatttatgattgtagttttgaatttttatttttatgttgtttaattttgttaggttgggtttttatagtttttttttaaagttagtttagtgtggtttatatggttagatttaggtgaaggttttgtttattgttttttgaggtttagttgggttttgtgtagatttttgatttttagtttggtttttttagaggattttgttttttaatatttgttttttgaggtttttggttgttttttagatatgattttgattttagttattgtatttggtttattattttgtggtggttgtagtggtagttataataattgtgttgttttttgtttaatttttaagagttagttttgaagttaagtgtgagtagttttaaatttattgtgttaaagggttttggatttattaattgggtagtttgtagatttttaaagtagttaattagagtttagttatgttgggtaggtttttttgggtggttagagtgtgaaagaaagaggaaagggtggttagagaaaaagtaggagggtgggtgttaattgagtgtgagtgtaagtgtttttttttagttgggagagtgttgttttattgtttttagttagtggagtaggaagttattgtttgttttgttttttttttaaatttttttttttagtattggtatagtttaaatttattatatttaaaatagtttattaaaaaagtgatattgtgtttatattgagattttattatttttatttttaatatttagggttaggagtgtatagttatgtttttttaaatgtgtgatttgtgggttggttttaaggagtatattttagtgattttaagaaggaaatggaaaatttaaaagattgttttaaaaatgtaaaggaaaatttattatttatattgttgtgttttgtttttattttatttttgaatttaatattaaattattttattatttatattttgtttattatataattaaaaatatttgaaatgtattaaattttaaaatatttttatattagaattttaaatatatagagagaggtatgtatttagagattgggttttattatgttgtgtatgttggtttttaaattttgggtttaagtaattggttttagtttttagtgtagttgtgattataggtatttgttattatgtttggtttaaatataattaaaatataaaaatttataattttatgaggggagagaaagaggtttaaattatgttttaaataatttagtgttaaaaattttgtttttattgttatttattatatttttgagagagatttttgtatttattgtagttaatttttttttttttttttttgtttttttttttttttttttttttttttttattttttttttttttgtttgtttgtggagataatgtttttttatgttgttttagttggtttttaatttttaggttttagtaatttttttgttttggttttttaaagtgttgagattataggtgtgagttattagtttaatttaaatattattttaaaatttttttaaaataaataaatagaatagtaaaatagagttagatataataaaaatttattttaaggatttttggttgtattgattttaatgggatatagaataaagattgattattatatttattataagtatgtattagaagatttaaattaggatatggaatggaatttttttatttttgtgatatagagtatattatatgtatttaagtgtttaatattttttaatataatgagttgtatttattatttggtgttatatattgtatttggtttaattttgataatttttgtttttaggtaatagaggtagagtatttgggagttatggtgtaggtaggaatttaagaatttttgttggagtttaattatttttaaaatttatgtttaaaatttaaattttattttttaaatgaaaatttattgttttagagaagtgttttagggaattaggttgttttgtgtagtttatggtattggttttaatgaattttaatatgtttttttttttgagaggtttaagaggaatttaatttttatattatttaaaaatggtaattaatttattatatttattttatttttaatataaagaagattataagtttttatagttgtgatgttaggtgtattaatttaatttaattatttttttttataaagttttagaggttattgtaaatttatgttattattttggtaaatatagtttattattttttgggttaatttttatgtagtatttttaaagtgtaatattgtgttttatagatataaaaatgaataagatatagttattgttggaggtgttgagggtaggggagtaggatgataattgggaatttttttttggtatttattttgtaatttatgttatagggtaatgtgagaatttagaggaggaaattgttaatgttagtagaagtgatatttgaataaaggttggggaaaggattttggagtgggttttttatatagaggaaattgtataagtagagtatagaggttagaaagttaatttaggtaatttagggtgttttttatggtagaatgtagggagtattgtattttgtgatgttaaagttagagaagggagtttatagttagaattttgatgagtgttgaatattgttttaaaggatttgagtaggagaggtatatatagttttggaattatattttaggaaaattattttagaggtggtattaaaaaaaaaaaaattgtagaggagagtaggggaaggtatgtgttttgaaaaattttatatttgtattttggtaaattttattttggaaggaaaagaaaagattagttggtattgtatataagtttttttggttttgttttttatatttatgtatttttatggtttgaatgtttgttgtttttttattttgttaatttatatgttgaaggttttattttattgggatggtgtttggagatgaggttttgggaggtaattaggtttagatgaggatatgagggtggggtttttgtgatggaattagtgtttttataagaagagatgttgaagagtttggttgtttttatgtgaggttagaatgagaaggtatttgttagtgaggaagttagtttttgttagaatttgatgttgtttgttttttgaatttgtatattaagtttttagaattgagtgaaaataaaattttgttgtttaaggtatgtagtttatggtattttgttatggtagtttaggttaagataagtgttttttttagataagaaaaatgtgagaatatttgtttgaaaatatatttttgggttgggtgtggtgttttatgtttataattttagtattttgggaggttaaggtgggtggattatgttgttaggagattgagattattttggttaatgtggtgaaaatttatttttattaaaaatataaaaattagttgggtgtggtggtatatgtttgtaattttagttatttgggaggttgagttaggagaattgtttgaattttggaggtgaatgttgtagtgagttgagatggtgttattgtattttagtttagtgatagagtgagattttttttaaaaaaaaaagaaaagaaaagaaaatatattttgggaaggaggtggaagaaattaataaaaatgtgttttttgtggaatataagagtgatttggtatagaggtggaaaggagagttttgtattttttgaatattgagttatgtgaatgtattattttagtttaaaaatgaatgaataaataaatgaatgaatgaattagttttgttaaggtttttattgttattggataaaaatggtaaaaattggttaggtatagtggtttatatttgtaattttagtattttgggaggttaaggtggaggattttttgaggttaggagtttgaggttagtttggtaatatagtaagattttgtttttatatagataaatatataaaaagaaaaaaaaaatttaaaagttgttggaaaatgtatgtaaaagaagaagatttatttttttttatgttaatttagaaaggaaagtgatagaaaatataagatatatagatttaggtttttttattataagtgaaaatattgaattattgttgttatgatagagttgggtgtttttttgattataaaagtaatgtgatttttttgtaaattttaagaaataatttaaagtgtaaaatatagataataaaagtttgttatatataatttttatgttttttatttttatttttgttttataaaaagagaaagagattattttaaatttgttggtagttgtattttaaatgtatatatgttaatttattttaattttttattggaattttagaaattgggtatggtgtagggagaagagatttatatgttaattttgggattaatgaggattaaggataataggtgagtagttgtggattttttatttaggtggggtgtaaatgtttataatgtaatatggtgaagattgttgtgtgtagaatatagtggagagggtattaggtaaggttttatagtaaagttgattgaattgagttttaaggaataaaaagagtttgttaagaagataaatgaaggtggagagtttgatttattgataagaaagaataatgtaagtttgtagattgaaattaatttagtatgttgaatataaatagaatttgggtgtttagtaagggttataaatattaggttaggtagttaaataatatttatattttgaaggtaatgtttaaggttatgttaaaagttttggattagatgttggatttgaataaaaaaatgtgaataaggtagtgatatggttataagtgggagttaggggggaaaagttatgaagagggttggtgatgtagtattagagttagtagataatggagggttttgtaatagttttagtaggtgttgaatttggggagatgttagttttaagaggaagaaatgataatgagatatttttaggagttgggattgggttaaaaaagggagaaggagttattagggatgatttgggtgtgtggttttgtaataggttgagggttttgttgttttagagagatgttaaggggtagttatggggtatggagtattattttgggtatattgatagtgaagtattgtgggatatttatgtggttggatatggttaagggtaagtgtaggttttatagggtttgaagtgtatattatttgtggattgttataatttgaaggtatgtgttttttttaaatgtatatgttggaatttaaattttaaggtgatggtattaagaggtagggtttttgggaggtgattattaaattttgagggttttttttttattaatgggattaatgtttttataata

SEQ ID NO: 377 - DNA, 6815 bp, Artificial Sequence
  chemically treated genomic DNA (Homo sapiens)
ttgtttgtgaattaaaaatttagagtttttttgtgaattatgttgttaagaattgtagatttaagttttaagattgtatgaatttaaattttgattttatggttttagttggtatgaagatataaagataattttttagtaaaaatagttttgaaagattgggtgtgatggtttatgtttataattttagtattttgggaggttgaggtgggtggattatttgtggttaggagtttaggattagtttggttaatatggtgaaattttgttttaattaaatatataaaaaaattagttgggtgtggtggtggatatttgtaattttagttatttagggaggttgaggtaggagaattgtttgaatttaggaggtagaggttgtagtgagttgagattatattagtgtattttagtttgggtgataaaagtgaaattttgttttaaaaaaaaaaaaaaatggtagaatgttatatggaaagttaatttttagagatagtaatttagatatttataatattatattgtttttttaagtatttatattaataaattaattaatatttgttgatttaatatggttagggatagtgttgggtttttataatttttaagtaattttagttagattttgtttttaaggagtttatgagtagtatgaggagataaaaaatagataaataattttaatttaggaagaatttgataaatgtatgataattattattagaatttagaggagaggaaattttttttgaatagagattaaaggaaggaataatgaatgtggtagtatttgggttggatttattataagaggtatgtttttttttgataagttaagaaagtggggatttaaggtagaagaaaagaaaagttttgagtttttggagtattaaaattttgtttggttgaagtataggttatagttggaggagatggattaggaaggattgttatgggtagagaggaagttttgaatttatgggggaagttatgatttgggttaaagatagagttgggttatgttaagatggattttgaagtagtaaaaaaaaatttaagaaagtaaataggttgtagggtttaggatgaagtttgggaggaaagggtagagtggtttttaggaggttgttaggataggtaaggtaatgggttttaaagggagtggttgaaatgtaatggaaaaagagagattgtaaagttagaaggtttaggaattgttttttgattaggtgtggaaggtaagggaaaattagtttttgaagaagatagtgagattttaatttgggtggttggagagatagtgatgttgggtatagatatggggaagttgagaggaatattatgtttgagaatggtgatttatatttgaataagtttgtaatgtttagtagattgttggaaaagtggggttggagatatatttaatggaggagttagattaatttttatttttttttatttgagagagttagtaagttatggttggaatgtgtgtgtttagtaggagagggtagggagggaagttaagagagttgggagtttgagtgaagtttttgttaaaggtagaagaggaaagttggtgtagtatagtatatttttttatttatgtttattaagtttagggataaggtttattaagatgagtttggaagagaatgttggagagaaagtggttaagaaaattgtttttattgaattttttgggttaattttgattgtaagtttttgaataattaaagtttgtgaggagatagttaatttttttattttttttatgttaatagtgaataattgtagatttttttttttttttttttttttttttttgttttttttttttttttttttgaatatttttgtttttttttgggattggtttagagtatgggtggttattgttgatttataggaggtattattgttattaataaagggtaatagtttttttttttaatatttatttatatttagtatttatttttaatattgattatggagagagtttttttgtgtttaaatattgtaatattgggggttttttaaagtataaaaatatatatttgtatgatggtattattaatatttttatggttttttattttttttttgtattggttttaagagttatttataaattttttagtaattgtatagtgttttagggttagagattggttatttttggtattgtgattagagttatttaatatttaaggtggtgattaatgtttggtaataaagtttttattgggtgttatgtgttttgggattttgagtgtgggtattttaggagtattttagtattgtgtgttagtattatggttgagagaatagttgagaaagtggttaagaggtggatttatgtgaatgttattgggaaatgagagattttgtttttaattatggttagtgtaatttgaaagtttaaaattagtttaaaataaaggtatttatttttattttatgtttatattttaggtttttaataatatgtattttttatatgtttatagaaagtagttaattgagttatttatggaaaggtttgtgggtttggttaatgaagtggaggagtattatattttagttggaaatatatttttagaatgttaaaatatttattttaaagtttggttttttggtgtaattggaggtatggtaatgtttttgtttagagattgggggttagggttagtaaggtatttgatttatatgtattttagaaggtttttattgttaaattatatttttttggaaaaattatttatgttttattttgtaaatttgatatttatatatttttgattggtattttattttagttgtaagattatgatttatagtaagtttgtttttttttttgtttggggtggtagtagaaagtatagggtattttttagtttttaagggtaggggtaaaggggttggggttttttttttttagtatagttttttttggttgtgttatattgttttttgtgagtagatagtaagtttttttttattttttattgttatttatttagtgttgtgtagtagtttagttgtgtgtttgttgggaggggttgttaagtgttttgtttattggttgttttttgaatttttgttattttatgtataaatatatttatatattttttttgtttagtttatatattgagttatttgtatatgtgagtatatttttttttttttttttatttttttggtttttgatttttataagtttatggaatatttttggaaagatgtttttgatttagtagggtaggtttgttttgatttttttttttgtagttttagtattttgagaaagtaatttatttttttggttagtgtttgtattttagtagggagatgaggattgttgttttttatgggggtatgtgtgtgtttttttttttttttaggatttgtaggattttttgtgttatttgtatataatttggtaggtttatattttttaagagttttatgaagtgttttttgtatgtgttttaaaaaggtatttgaaaattgaaagtgtgatttatggaaattaaattatttgtaaaaaattgttttggaaagtaatgattgttggttataaagggaaatatttgtgatgtatttaatgtgtttttaattttttatttgttgataatttatagttattaatgttaaatttgattttggttttagttatatttgtatattgtttaataatggtttatttttgtaagaattagataaaatgtatatttgatataaaatagttaaaaatgtaatttttagtaatagtaagtttggtatttagatagattatgaatattttgttagatattttgttgggtgtttgggatagtaattaaaataaagtattgatagttgtattagagtttattaggttgtagtaaaggaagtttatttaaaagtataaattatttaagattatagatgtatgatatattttatttattttttgtttttttaatatgtatatatatatatatatatatatatatatatatatatgtgtgtgtgtatgtgtgtgtgtatgtttaatttttaatttagttaaaaatttttttttatttgttttttatttggatatttgattttgtatattttagtttaagtgaattgagaagattgagttgtaggattaaaggatagatatgtagaaatgtattttaaaaatttgttagttggattagattgataatgtaatataattgttaaagttttggtttgtgatttgaggttatgtttggtatgaaaaggttatattttatatttagttttttgaagttttggttgtataattaatttgtggaaggtatgaatatttatgtgtgttttaattaaaggtttttttgaattattttttatatgagaatttttaatgggattaagtatagtattgtggtttaatataaatatataagttaggttgagagaattttagaaggttgtggaagggtttatttattttgggagtattttgtagaggaagaaattgaggttttggtaggttgtatttttttgatggtaaaatgtagttttttttatatgtatattttgaatttttgtttttttttttttagatgttttttgttagtttttttagttgttaaatatagttgtttgtggttggttgtgtatgtaattgtatattttattttatttgttttattttggttatagtgtagttttttttagggttattttatgtatatattatgtatttttagttaatgaggagggggaattaaatagaaagagagataaatagagatatattggagtttggtatggggtatataaggtagtatattagagaaagttggtttttggatttgttttttgtgtttattttaagtttagttttttttgggttatttttagtagatttttgtgtgtttttgttttttggttgtgaaatttagtttttatttagtagtgatgataagtaaagtaaagtttagggaagttgttttttgggattgttttaaattgagttgtgtttggagtgatgtttaagttaatgttagggtaaggtaatagtttttggttgttttttagtatttttgtaatgtatatgagtttgggagattagtatttaaagttggaggtttgggagtttaggagttggtggagggtgtttgttttgggattgtatttgtttttgttgggttgtttggttttattggatttgtaggtttttggggtagggttggggttagagtttgtgtgttggtgggatatgtgttgtgttgtttttaattttgggttgtgttttttttttaggtggtttgttggtttttgagttttttgttttgtggggatatggtttgtattttgtttgtggttatggattatgattatgattttttatattaaagtatttgggatggttttattgtattagatttaagggaatgagttggagtttttgaattgtttgtagtttaagatttttttggagtggtttttgggtgaggtgtatttggatagtagtaagtttgttgtgtataattattttgagggtgttgtttatgagtttaatgttgtggttgttgttaatgtgtaggtttatggttagattggttttttttatggttttgggtttgaggttgtggtgtttggttttaatggtttggggggtttttttttatttaatagtgtgtttttgagtttgttgatgttattgtatttgttgttgtagttgttgttttttttgtagttttatggttagtaggtgttttattatttggagaatgagtttagtggttatatggtgtgtgaggttggtttgttggtattttataggtatttgtgtttgtgttgtttgttggggtggttgttgtgtttggtaggagggagggagggagggagggagaagggagagtttagggagttgtgggagttgtgggatgtgtgatttgagggtgtgtgtagggagtttggggtgtgtggtttagtttgggggttttgtgtgtagtttgtgttgtgtttagagttaagtttttttgttgggtagttgaaaaaaatgtattttttatttatttattgtttgtgtgagaggtagatttgaaagtttgggttttttaataaaatatatgttggaaaattagataaagtagtagttatttgtgggggaaaatatttttaggtaaataaatatggggtgttttgagttatttgggaaggttttgtttttggtatttaaagttgggggtgtttggagttagtagagtttagtagagttttatttatttttttaatgtttttgtttaatgtgttttttaaatttttttttatttagattatttgattggaaatatgttagttatgatgatgattttttgggaagtgatttttgttatttgttttttttttttttttattttatgttttggggttttagagagtgattgggagttgaatgggtttgattttggagttagttggttgagtttgtgttggagtggattgttggtatgtgatttttgatagttggaaatttgtaggtgttttgtgagtttaaaataagttatatggaagtataagtgtttaaaaataattttttgttagtttagtgataagtttgttttatttggggagaatgttttggagtggtgtgtgggttagttagggtttgtgttttgtagttattgtggaaggagtgtggttggtttaggatataggagattattttgtgattttaatggtgaaggttgtgtgtttttattttaatttttttttttataagaattgttttttttttttttttttttttttttatttttttttgtttagttttttttttt

SEQ ID NO: 378 - DNA, 6815 bp, Artificial Sequence
  chemically treated genomic DNA (Homo sapiens)
aaaaggagaaattgggtaagagaaaatgggagggagaggagagggagaaagaataatttttgtagggaaaaaaattaaaatgaggatatataatttttgttattgaagttataaagtggttttttgtgttttggattggttgtgttttttttatagtggttgtgaggtgtagattttggttgatttgtatgttattttggggtattttttttgggtgggataggtttgttattgggttggtaggagattatttttaagtatttgtgtttttatatggtttgttttaaatttgtgggatatttataaatttttggttgttagaagttatatgttagtaatttgttttagtgtggatttagttagttaattttgaaattagatttatttaatttttaattgttttttaaagttttaggatgtggggtggggaggaggggaaagtgggtgataggaattgttttttagaaagttattattatagttgatatatttttaattaaatagtttagatgaaaggaaatttggggagtatattaaataaaaatattaaaaggataaataaaattttgttgagttttgttaattttaaatatttttaattttaaatgttaagagtgagatttttttaagtgatttaaagtgttttgtgtttatttgtttggaggtgtttttttttataaataattgttgttttgtttggttttttaatgtgtgttttgttaggaagtttgggtttttgggtttgttttttgtatggatggtaagtgggtggagagtatgttttttttagttgtttggtgagagaatttgattttgaatgtagtgtgggttgtatgtagaatttttgggttgggttgtgtgttttgggttttttgtgtgtatttttgggttgtgtgttttgtggtttttgtagttttttaggttttttttttttttttttttttttttttttttttgttgggtgtggtggttattttgatgggtggtgtgggtgtgggtatttgtagaatgttggtgggttggttttgtgtattgtgtagttgttgggtttgttttttaggtagtagggtatttgttggttgtggggttgtaggaaaggtgatagttgtggtggtgggtgtagtagtattagtgggtttggagatatgttgttgagtggggggaaattttttaggttgttggagttgaatgttgtagttttagatttggggttgtaggggaggttggtttgattgtagatttgtgtgttggtggtggttgtggtgttgaatttgtaggtggtgtttttggggtagttgtatatggtgggtttgttgttgtttaggtatattttgtttaggggttgttttagggggattttgagttgtggatggtttaggggttttagtttgtttttttggatttgatgtagtagggttattttagatgttttggtgtggagggttatggttatggtttgtggttgtgggtagggtgtagattgtgtttttgtagggtagaaggtttagaaattggtgggttatttggaaaaagagtatagtttgaggttagaggtgatgtagtgtatgttttgttgatatgtgagttttggttttggttttgttttgggagtttgtgggtttggtgaagttgggtgatttgatgggagtaagtgtagttttaggatgaatgttttttgttagtttttgggtttttgggtttttaattttaagtattggttttttgagtttatatgtattataaaggtgttggaggatggttagggattgttgttttgttttgatattggtttaaatattattttaggtataatttgatttggagtgattttaaagagtagtttttttgaattttattttatttgttgttgttgttggatagaggttgagttttatggttagggggtgggggtgtatgaggatttgttaaaggtggtttagggaagattgggtttaaaataaatgtgaaagatggatttaggggttggttttttttaatgtgttgttttatgtgttttgtgttagattttgatatatttttgtttgtttttttttttgtttgattttttttttttgttggttagaaatatgtagtgtgtatataggatgattttggggaggattatattgtaattgagatagggtagatagaatggggtgtgtggttgtatatgtagttagttatagatagttatatttagtagttgggggaattgatagggggtatttgaggggaagggggtggagatttagggtatatatataggaagagttgtattttgttattaggagaatgtaatttgttaggattttagtttttttttttgtaaaatgtttttaaagtagatagatttttttataattttttgagatttttttagtttgatttgtgtgtttatgttggattatagtattgtatttggttttattaggaatttttatgtgaaggatgatttagaaaaatttttggttagggtgtatatgggtgtttatgttttttataggttggttatgtaattaaaattttagaaaattgaatataaaatgtgatttttttatattaaatataattttaggttatgaattaaagttttggtaattatgttatattgttggtttggtttagttaatagatttttaaaatgtatttttgtatgtttattttttagttttataatttgatttttttggtttatttgggttaggatatgtagaattaaatatttagatgaaaaataaatagaaaaaagtttttaattgaattaaaagttaaatatgtatatgtatatatatatatatatatatgtgtatatatatatatatatatatatatatatatattaaggagataaaaaataggtgaagtatattatgtgtttataattttggatagtttatatttttgaataaattttttttgttgtagtttaatagattttgatataattattaatattttgttttaattgttattttaaatatttaatagagtatttgatgaagtgtttatggtttatttaaatgttaagtttattgttattaagagttatatttttgattattttatattaagtatatattttatttaatttttataaaaatagattattgttggataatatgtaaatgtagttgaagttaaaattgagtttagtattaatgattatagattgttagtaaataaagggttaaaaatatattaggtgtattgtagatatttttttttatggttagtaattattattttttaaagtaattttttatagatgatttaatttttataaattatatttttaatttttaaatgtttttttaaaatatatgtaaaaagtattttatagggtttttaaaaaatgtgaatttgttaaattatatgtaaatggtataaagaattttataagttttgaaagaaaaaggagatatatatatatttttatggagaatagtaatttttatttttttgttaggatatagatattagttagaaaggtaagttgtttttttaaaatgttaaagttatagagagagaaattaaaataagtttattttgttggattaagaatgtttttttagaaatgttttatgggtttgtagaagttaagggttgagagagtgagaaggaaggaaggaatgtgtttgtatgtgtgagtggtttagtgtgtgaattaggtagagagagtgtgtggatgtgtttgtgtgtggaatggtagggatttgggaagtagttagtaggtagggtatttggtagttttttttggtagatatgtagttgggttattgtatagtgttggatgaatggtagtggggagtgaggggagatttgttgtttgtttatagggagtagtgtggtatagttagagaaagttgtattggggaggagaaattttagtttttttgtttttatttttggaggttggaaagtattttatgttttttgttgttattttaagtaagaggaaaaataggtttgttgtgaattatagttttatggttaaaatagaatgttagttaaaagtgtatggatattaagtttataaaataggatatgggtggtttttttgaaagaatataatttaataataaaagttttttgggatatatgtggattaaatgttttattggttttagtttttagtttttgaatagaggtattgttatgtttttgattgtattaggaaattagattttggaataaatgttttggtattttagggatgtgtttttagttgaaatgtaatatttttttattttgttaattaaatttataaatttttttatgaatagtttagttgattgttttttgtaaatatgtgaaaaatatgtattattaaaagtttaggatatgaatataagataaaggtagatatttttgttttaaattgattttaggtttttgagttgtattgattgtgattgggaatgaggttttttattttttagtggtgtttatatggatttattttttgattatttttttaattatttttttggttatagtattaatatgtaatattgaggtgtttttagagtgtttatgtttagggttttaggatatatgatatttaatggaggttttgttgttagatattagttattattttggatattaaatgattttaattataatgttaggagtggttggtttttggttttgggatattatgtagttattgagagatttatgagtggtttttgagattagtataaaaaagaaatagaaagttataaaaatgttaatgatgttattatgtaaatatatgtttttgtgttttgaaagatttttagtattgtagtgtttgagtataggagagttttttttatagttagtattgaaaataaatattggatataaataaatattgaaaagaaagattgttattttttgttggtgatagtggtgttttttgtaggttaataatggttatttatgttttagattagttttagaaaaaagtaagagtatttagggagggaggagagaggaataggggaaaggagaaggaaaggaaaggggatttgtaattgtttattattgatataggaagaataagaaggttagttgtttttttataggttttgattgtttagagatttataattaaagttagtttaagaagtttagtaaaggtagtttttttaattattttttttttagtatttttttttaaatttattttggtgagttttgtttttgggtttggtgagtatgggtgggaaagtatattgtgttatgttgattttttttttttgtttttggtaaaaattttatttgggtttttagtttttttggtttttttttttatttttttttgttggatatatatgttttagttgtgatttattggtttttttaggtgaagaagggtaaagattgatttggtttttttgttgaatgtgtttttagttttatttttttagtggtttgttgggtattgtaggtttgtttaaatatgagttattatttttaaatatggtgttttttttaatttttttgtgtttgtgtttagtattattgtttttttagttatttagattaaaattttattgttttttttgagggttgatttttttttgttttttatatttaattaagaggtaatttttaagttttttagttttataatttttttttttttattgtattttggttattttttttgagatttattattttatttgttttaatggttttttaaggattattttgttttttttttttggattttattttaaattttgtaatttgtttatttttttggatttttttttattgttttaggatttattttgatatgatttagttttgtttttaatttaaattatagttttttttatgagtttagggttttttttttgtttataatgattttttttagtttattttttttgattgtaatttatgttttagttaagtaaaattttaatattttaagaatttaaggtttttttttttttttattttaaatttttatttttttggtttgttaggggaaagtatgttttttgtaataggtttagtttaaatgttattatatttattatttttttttttagtttttatttaaagaaaatttttttttttttgaattttagtagtagttattatgtatttattaaattttttttgaattagagttatttatttgttttttatttttttatgttgtttataagttttttgaggataaggtttggttagaattatttgggaattatgagaatttagtattgtttttggttatgttaagttaataaatgttggttaatttattgatatagatatttaaaaggataatgtaatattataggtgtttggattattatttttaaaagttaattttttatgtgatattttattatttttttttttttttgagatagagttttatttttgttatttaggttggagtatattggtgtgattttggtttattgtaatttttgttttttgggtttaagtgatttttttgttttagtttttttaagtagttgggattataggtgtttgttattatatttagttaatttttttgtatgtttagttgagataggattttattatgttggttaggttggttttgaatttttgattataggtgatttatttgttttaattttttaaagtgttgggattataggtatgagttattatgtttggttttttaaaattgtttttgttagaagattatttttgtatttttatgttaattgaggttataaagttaaaatttaaatttgtataattttgaggtttaagtttgtaatttttggtagtatgatttataagagagttttgaatttttagtttgtaagtag

SEQ ID NO: 379 - DNA, 5527 bp, Artificial Sequence
  chemically treated genomic DNA (Homo sapiens)
ggttttttgttgttgttaaattaataattttagtttttgggtttagttatttgttgttgttaaaaatgttgttgagagtgatggagaggtgttttagtttttattttatagattagaaaattaaggtttagagaaattaagtagttttggagataggagttatggtttttttatttgagttattattttgaaatattaaggataagttaattttattaatagttttaggtttgtgagaaatgggtttggtttattttgaagattgtaaataaataaaaaaatagattgttttattattgatgagaaatatgagttattttgttaggaattgaaagtatagttgtttataaaaaagttatgttggggtttagtttttttaggtttttgtgtgtgaaaaattatttagttaaagttttttttttatttttttttgtgtttagtaggatgttgaaatttttggaaaagataatggaaattaggggtaggaagagaatagtgtggggtgttaaatagattttagtaatttttttgtttatggttatttttgtgtagatattttgattttttatgtgtaggtggagtagtgttttttagttttttttagaggtttttttttgtttgttttttagttatattgtttgagattgataatgttttatagtaagatggaaatttttttttatagtattattttgtgattttgtagttataaagttgagatttttgaatgtggtatttttttgtttttttattgttttatgtgtatttgtgttattttttttgttttattgtaaatatatttttaaaatttttattttttttatttagaaatagaattataagtggatggttaaataatttaaataaatggtttatggggaaaagtgaattttatattgttttttaaatttttagtgttttttatggagataattattgtttttaatgttttgaatatttttttagagatattttatttttatataagtatatgtgtatttgtgttttttttttattttttttttataaatattagtagattgttttgtattttggttagtttatttaatatattttggagttaggtgtggtggtttatgtttgtaattttagtattttgggaggttgaggtgggtggattatttgaggttgggagtttgagattagtttgattaatgtggagaaattttgtttttattaaaaatataaaattagttaggtgtggtggtatatgtttgtaattttagttattagggaggttgaggtaggagaattgtttgaatttgggaggtggaggttgtggtgagttgagattgtgttattgtattttagtttgggtaatagaatatatagatttgtttgattttttttatgattgttatagttttattgaatgtatggattattagtgttttagttagtattttagtgatgggtatttagggattataaattttataagggtagaaataatattttatttattttttgtttttgatatggtttggatgtgtgtttttgtttaaattatatgttaaggtaattttttatgttagaggtggggtttggtggaggtgattggattatggggatggattttttatgaatgggttagtattatttttttggtgttgtttttgtgatagagtttttatgagatttggttgtttaaatgtgtgtggtatttttttatttttttggttaagtttttgttatgtaagatgtttgtttttgttttgttttttgttatgaataaaagttttttgaggtttttttagaagtagatgttattatgttttttgtatagtttgtggaattgtgagttaattaagttttttttttttatgaattatttagttttaggtatttttttgtaatagtgtgaggatgagttaatatagttttttatattgtaatttaaggtaatgttttgtataaagggatgaattagattgtttagtaattaaaatataaatataaattataagtatatttatttatgaattgggggatagtttttatttgattttgagttttgatatttgttgttttgttttgttaaaaatgtgttagtttttatttagttttttattagttatattattaattaatatgtataatatgtataatttgttaggttaggaggaaatttatggatataagaaatgttttttttttttaggaaatgataatttgttttgggagagaaggtaggtattttttggtaaaagtgatataataaaataattaaaaaaagatggattttttttttttttttgagatggagttatgttttgttatttaggttggagtgtagtggtgtgattttggtttattgtaatatttgttttttaggtttaagtgatttttttgttttaggtttttgagtagttgggattataggtatttattattatgtttggttaatattttgtatttttagtagagatggggttttattgtgttagttaggatggttttgattttttgattttgtgatttgtttgttttggttttttaaagtgttgggattataaatatgagttattgtattaggtgaaaagatggattttttaaaaaaggtgttaggataattaggtttttatttgtaagaaagtaaagttagaagtttattttagattatgtatattagtataaaaatgttaaatggtttaaagataaaatgttaaaataagtttagaaaggtattaaaagaaaatatagaaaatatagtattagtaaaaatttttttatataagatgtaaaagttagaagttataaaggaaaaggttgataaattagaatagataaaaatgtaaaatttttgtataatataagatataaagaatgaatttaaagatatataatgaaggttaggaagatgaagatgttttggtgatgagtggtggttatatattagtattaatgtatttaatgttattgaattgtatatttaaaatgatgaaaatggtaatttttatgttatgtgtattttattatataaaaaaagatatgaaatgaattggggaaaatatttgttatataattaagaatgaaggtttttaataaaatttgtaaaattatatatatttttaggaatgaattaataaataatttttatgaattagaaaaaagtgataatttaattaaaaaatgaataagggatataagtaatgtgttttatagaaaaaataaaaattgataatgaagttatgaaaaaatgtttagtttttttagtaattgtataaaataaattaaaataatgagatattatttttaagattagtaaatgttaaagaaaaataataattggtgagggtgtggggaagtgggtatttatatttatgtttggaaatataaattggtgtaattttatagggagagtaattttataatattttttaaagatttatatgtataattttatggtagagaaatttattttttttttaggatttttttttttttaaaaatagtgatgtggatgaaaaatatatgtttattattgtatagggtataatagttgaaaattggaaatgataatatttatattttttttagtaggggaatggttaaataaattttataagttatttggtagatattaggtatgagttaaaagttagggtttagttagagatggaaagtatattagtaatttgaaagggaaaatgtaatatgaagaattattaattagtaaaagaaggttaattgttaaaggtataagagtatttaagttgtttgtagttagtaggttttggttggtgagtaggaagttgtttgttgggaggttgttaaagttttttgaaggtgagtattattggttttataagttgttggtagttatggtgttaagagtaggaagagaagtattagaatttggaagagaaatttagttttttgttaggttttgtattgtttttttggtgttttttattgataaagttagtaaaattgtgttgttagtaaaggagatttttttatgggatgtagtttggtgttattaaagagaatagagtggatttggagtttagatgtaatataatgattgatattggtatagtatatttattttgtttttgtaaataaaatggtatatgtgatgtttttttttgtttttttgtatataaaataatatttgtttttatttattatgtatttatgtttttattttgtatgttaggagttaagtattttgtatgtattaatttattttgtttttataataatttttatatgtaggaattattatagttattttatgaatgagttgaggaaggtattgagatgttaagtaatttgtttaaggttatgtagttagtaagtggtagagtaagaattattatggttttataagtttaggaaaaagtttgaaagaattaaaatgttaatagtggggattttaaggaagtattgaagaggttatgggagaagtttttattttgttaaaaaattagttttttaaataaataaatatagtgaggtttttttagaagtagatgttattatgttttttgtatagtttgtggaattgtgagttagttaaattttttttttttataaattatttagttttaggtatttttttataatagtgttaggatgagttgatatagttttttatattgtaatttaaggtaatgttttgtataaagggatgagttagattgtttagtaattaaaatgtaaatataaattataagtatatttatttatgaattggggggttgttttgtgtgtatagataaggtatattttttaaaaaaattatttttttaagaagaaaataaattagttaataaatgataatttatagtgttaggaagtgagaaataagtgtgtgataaatggtggagaatgggagtattttttgtagtgggtgggaggagatgaggagggtgttttttggggagtggtagtggttggagtaaaggtttggaggaggtaagttatgtgttttgagtttttggtttttgttttattttgtgtttgagttggtttgaaggttggttgtttagattgagttttttgtttgtttgtattttgttaatagttttagaagaaggtgattggtggttgtttgaggaatattagtgggtaagagaattagtatttttggagtatttgttgtttgtgagattaagtattatgtatattgttttatttattttttatagtaattttattaagtagtttttttttatgtgaaaagatggaggttgggtggagtaaaaggaggtatttagagtttttagtaagtgagaggtagagttgggatttgaatttagatttgtttgatattgaagtttaggttggttttatttttttggattgttttttagggagtagaagatagatattttattttagttggttgtttttagaagtttgattttgttggtttaaaatgattttagttttttgtttagaggttgtgggttgtgggttaagatattagtagaaggagggtttagttagagaggttgatatgggtttttatttattgttatttttttttttttttagg

SEQ ID NO: 380 - DNA, 5527 bp, Artificial Sequence
  chemically treated genomic DNA (Homo sapiens)
tttggaaggaaggagagatgatggtgagtagaagtttatgttagtttttttggttgggttttttttttattgatgttttgatttgtagtttgtagtttttgggtaaggaattaaagttgttttgagttagtagggttagatttttagaagtagttagttaaggtaaaatatttgttttttattttttggaaagtagtttggagaggtggaattagtttagattttagtattaggtagatttggatttaaattttagttttgttttttatttgttgaggattttaaatatttttttttgttttatttagtttttatttttttatgtggaaaagaattgtttggtaaggttgttgtggggagtgaataaagtaatatatatagtgtttaattttatagatagtagatgttttagaaatgttaatttttttgtttattggtattttttaggtagttattagttatttttttttgaagttgttggtggggtataggtaggtaggaagtttagtttgaataattagtttttagattagtttagatataaggtgaaatagaaattaaaaatttagagtatatgatttattttttttaaatttttgttttaattattgttattttttagggaatgttttttttgtttttttttgtttattgtggagagtgtttttattttttattgtttattatatatttgttttttattttttggtattgtgagttgttgtttattaattggtttattttttttttggaaaaataatttttttaaaaaatatattttatttatgtatataaagtagttttttaatttatgaatggatatgtttgtggtttgtatttgtgttttaattattaagtaatttggtttatttttttgtgtaaagtattgttttaggttatagtgtaggaaattgtattagtttattttagtattgttataaagaaatatttaagattggataatttataaagaaaagaggtttaattggtttatagttttataggttgtataggaagtatagtgatatttgtttttggggaagttttattgtatttatttatttgaaggattgattttttaataaagtgaaaattttttttatggtttttttaatgtttttttgaggtttttgttgttaatattttgatttttttagatttttttttaggtttataaagttatagtaatttttgttttgttatttattagttgtgtgattttgggtaagttatttaatgttttagtgttttttttggtttatttataaagtagttataatgatttttgtatgtgaaggttattatgagaataaaatgagttaatatatgtaaaatatttagtttttggtatgtagagtaaagatataaatatataataagtagaaataaatattgttttatatatagagagataaagagagatattatatatattattttgtttataaaagtagggtaagtatattgtgttagtattaattattgtgttgtatttgagttttaagtttattttgttttttttggtgatattaagttatattttataaaaagattttttttgttagtggtataattttattggttttgttagtagagggtgttagagggatggtgtaaggtttagtagaggattggattttttttttgggttttggtgtttttttttttgtttttaatgttatgattgttagtagtttgtagaattagtggtgtttatttttagggaattttggtagttttttagtgggtagttttttgtttattagttggggtttgttgattgtagatagtttgagtgtttttgtatttttagtagttagtttttttttattagttaataattttttatattatatttttttttttaaattattggtgtgttttttatttttaattggattttaatttttagtttatgtttggtatttattagatggtttgtaaaatttatttaattatttttttattgaagggaatgtgagtattattgtttttagtttttagttgttatattttgtgtagtagtgaatatgtgttttttatttatattattgtttttgaaggaaaaaaaattttggaagaggaataaatttttttgttatagggttgtgtatgtaagtttttggaaaatgttgtgagattgttttttttataaggttgtattaatttatatttttaaatataggtgtaagtgtttatttttttatatttttattaattattatttttttttaatatttattaattttaggggtaatgttttattgttttagtttgttttgtgtaattattaaggagattgaatatttttttataattttattgttaatttttattttttttgtgaaatatattgtttatattttttatttattttttagttggattgttatttttttttaatttatagaaattatttgttgatttatttttaaaagtgtgtatagttttatagattttattaagggtttttatttttagttatgtagtaaatattttttttgatttattttatgtttttttttatgtgatgaaatatatataatataaaaattattatttttattattttaagtgtatagtttagtaatattaagtatattaatattgatgtgtaattattatttattgttaaaatatttttatttttttaatttttattgtatgtttttaaatttattttttgtgttttatattatataaaagttttatatttttatttattttaatttattaatttttttttttatgatttttggtttttatattttgtgtagggaaatttttgttggtgttgtattttttatatttttttttaatatttttttagatttgttttaatattttatttttaagttatttgatatttttgtgttggtatgtatggtttgaggtgggtttttaattttatttttttgtaggtggggatttgattattttaatattttttttaaaaaatttatttttttgtttggtgtagtggtttatgtttgtaattttagtattttgggaggttgaagtaggtggattataaggttaggagattgagattattttggttaatatagtgaaattttgtttttattaaaaatataaaatattagttgggtgtggtggtgggtgtttgtagttttagttatttgggagtttgagataggagaattgtttgaatttgggaggtggatgttgtagtgagttgagattgtgttattgtattttagtttgggtgatagagtgtgattttattttaaaaaagaaaaaaagatttatttttttttgattattttattatgttatttttgttaaaaagtatttgtttttttttttaaagtagattattattttttagaagggagggatattttttgtatttataagtttttttttgatttggtagattgtatatgttatatatgttggttggtgatatgattgataggaagttgaatgagaattagtatatttttaataaagtaaagtagtaggtattagaatttagaattaaataaaagttgttttttaatttatgaatggatatgtttgtggtttgtatttgtgttttaattattaagtaatttggtttatttttttgtgtaaagtattgttttaggttatagtgtaggaaattgtattagtttatttttatattgttataaagaaatatttaagattggataatttataaggaaaagaggtttaattggtttatagttttataggttgtataggaagtatagtggtatttgtttttggggaagttttagagagtttttatttatggtagaaggtaaagtaagggtaagtattttatatggtaggaatttgattaagagagtggggaggtgttatatatatttaaataattagattttatgagagttttattataagaatagtattaaagggatggtgttaatttatttatgaaggatttatttttatgatttaattatttttattaggttttatttttgatatgggggattattttgatgtgtgatttgggtagggatatatatttaaattatattagaaatagaggatgggtaagatattgtttttgtttttatgaagtttgtgatttttaaatgtttattattaaggtgttagttggagtattgatgatttatatatttaatggagttgtagtagttatgaaaaggattaagtagatttatatgttttgttgtttaggttggagtgtaatggtatgattttggtttattgtaatttttgttttttaggtttaagtgatttttttgttttagtttttttagtagttgagattataggtatgtgttattatgtttggttaattttgtatttttagtagagatggggtttttttatgttggttaggttggttttgaatttttgattttaggtgatttgtttattttggttttttaaagtgttgggattataggtatgagttattgtatttggttttaagatatgttaaatgagttaattaaggtgtaaaatagtttgttagtgtttgtggggggaaaatgagggaaggatataaatatatatatgtttatataagaataaaatatttttgaaagaatatttaaaatattagaaataataattatttttataaaaggtattgaaagtttgggggatagtgtgaaatttatttttttttatggattatttgtttaaattgtttaattatttgtttgtagttttatttttaaataaagaaaatgggaattttagaagtatgtttatgatgaaataagaaagatgatataggtatatgtgaaatagtaagggaatagaagagtgttatgtttagaagttttaattttgtggttgtagaattgtaaggtggtgttgtaaagggaggtttttgttttgttgtagggtgttgttaattttaggtgatgtggttggaaggtaggtagaaggaagtttttggaaagaattaggaaatgttgttttatttgtgtatggggggttgaggtgtttgtgtagagatggttgtgggtagggaggttgttgagatttgtttagtattttatattgttttttttttgtttttgatttttattgttttttttagaaattttagtattttattgagtataaagagaaataaaaggggaattttgattgagtggttttttatatataaggatttggagaggttggattttggtatagtttttttatgggtagttgtatttttaatttttggtagaatgatttatattttttattagtaatggagtagtttatttttttatttgtttataatttttaagataaattaagtttattttttataggtttaaaattgttgataaagttggtttgtttttgatgttttaagatgataatttaagtggagaggttatggtttttatttttaagattatttagtttttttgggttttgattttttgatttgtaaaatgggaattaaaatatttttttattatttttagtaatatttttagtagtagtaggtggttaaatttaagggttggagttgttaatttggtagtagtaagaagtt

SEQ ID NO: 381 - DNA, 10224 bp, Artificial Sequence
  chemically treated genomic DNA (Homo sapiens)
agtttttatagttttagtattgttttttttattttattttgattgtgtttttgttgtttatttttgtttatttattttaattttagtgttttttttagtttttgggttttaggtgatatattagttagtgggatatgggtttttataggtatttttagtttaatttagttttttttttttttttggttttttggttagtatttgtattatattggtttttattggatatttttgtagttttgggttttttttatagatatattgttggattagttgtttaatttggtttatttgtagagttttttggtttatttgattttaattgaaatttagttttttaagaaggatttggtgttggaataggtaggtattggaaagttagttgtttaggattattgttttattttattagtatttttttgttattttttattttttttttttagattttagaaatttgggagtggttggagtgagaaaatagaggtaagtggtaggtaattgttaagtattagttttagtatgtgtttagttttttagagtaggatttgtggttgtaggtgtgaaggtaaggtttgtggaaatggtagggagggtggaggggatgtaggaggtatggatgtgggtggggtgtttttattttttagggttagttagatttttttgatttttttttaggtgggttgagatttataggttggatgtgttagaggtagtggttttagagtggttttgttgtgtttattgtagtgtagaggtttttaagtgttgtttatgatgttagaatgagtggtattgttgtaggtgagggtattttagaattttggatttttaagttttatttttatattttttatatgtattgttatttttaatatttatttgtttgtagggagtgttaagttaagtattgggaaaagtatggaaagatttgtgttttggtagtttagggtgatagagttaaatgagggttgtagttgttgagggttgattatttatgttaagggaatttatttagaatgtatttttgaattttaagattatggtttagtttttgttggagttttagtttttgtagtggagagtagagtgggtggtaaagttgttgattgattttttttttttttattttaagtgaaggtttgagattttttgttttatttagtgggtaggttaagtgtgttgttttagtaaattggattaggagggttagggttggatgtggggattttttttttttagtatagtaaagttggtttttagaaatatgggtatttttgtgtggtgttttgtggttgttgttgttgtggttgtttggggtggggtgtgaggaggggatgaaggagggaaggaagggtaaggtggggggggttttgtgagagtgtgtttagttttgtttttgggttttatagtttttgtatttaggtttttattgtgtggttttttttagtttttttttgttgtttagtttggattttgggggaggtgttgaagttggggtttgttttgtggttttgtttggtttgtgtttgttagtgtttaaagttagtgaagtatgggtttaattgggttatgttgggggagtttgagtttattgagttgtgggagttggtatttgttgggtgtgttgggaagggttgtatttggttggagtgtgttaatgtgttgtgtattgtgtggggtattgtgtgtaattttatatggtagttggtttttggttgtggttattgtttttagtttgtggggtttgttatgtatatgtggtgtgatttttgtggtgattttatttggggtgttgtgtgtaaaggtttgtagtgtgtgtgtgagtagtggttttgtgtgtttatgagagtggaaggggtagttaaggggtagtgtagttgttgtgggttaagttgtggtagagggggttggtggggatagtttttgaggattaggtttgttatttttgttttattgttgaagagtgtgtgaaaatggtttattttttgttgtattttatttgtatttgggttatagatgagtagaggtggttgtttatatgtaaaaatatgttgattttaagttttttatttttaaaatgttttggttttttttgagaaagggtttgtgtttattgtttttggagtttatttttttaggtttgtttttttttaaatatttatgattttttttagaatttttagggtgaagggaaattattatttatgggagggagtttggaaaaatttagaatttttggtgggttttttgtaagtaggagttttgttgagtttttatttagtaaatatttttttttgatttagtgaattagatgttaaaatatgtatgtagttatatatttagtagtttttttgtatttttgggaattgttagtaagtaaaggttgtttttttttgggtagatattagttggaattattaggggtgtttttatagttttttttgttagtttggattttattgtagatttgttgaattaattgttgggagtggattttaggtattagtaaattttaaaaattttttaaattattgtaatatggagtttgggttgagtattattgttttggtttatttaggaatttgtggatggatagtgttttaggtttgtgtgtgtatggagatttttttatttggtataagaggatattataaatttagttggggggagtataaagttgtgatagaatgtaaagaatgaataaggggttgagtgtggtggtttatgtttgtaattttagtattttggaaggtggaggtgggtggattatttgaggttaggagtttaagattagtttggttaatatggtgaaattttatgtttattaaaaaataaaaaaaaatgagttaggtgtagtggtgggtgtttgtaattttagttatttgggaggttgaggtgggagaattgtttgaatataggaggtggaggttgtagtgagttgagattgtgttattgttttttagttttggtgatagagtgagattttgttttaaaaaaaaaaaaaaaaaaaaaaagaataaggttgggatattgtagtgtttttaaagagaaataaagtagttatggagataagaagtaggatgatttgggtatgtttattagaggtagagataagggagaaattaaagataagtttgggtttttgtttttagtaattgggagtttagtggttatttttgttgtaaagaggaagttgggtaagtgtagtagtgaggttgaagaaaagggaattaaattttggttatgtttatttgaaatgttttttagatattttagtgaaggtattggtatggaggatttagtttgagggtttaggttagtgttttagttgtggatttggggtagatgaatgtagatagattaggttagtgattaggattgagtttagattttattgtgagatatggaagttgagttagaatttgtaaaggagttgagtaggagttgtagggggtaggaggaaaattgggagagtgtagtttttgggagttaaagggagtaagttttaaatgatgttgagggggtgagaatggagaatggaatattggattttatttggtagtatatagattgttgaggattttgttttgggtagttttttggaggaagaggtaagtttggttggagtgggtagaggggagagtgaaggtgaaggattagagtgtatagagattagtgttttggtttgaggggagtagagataggtgataattatagggtagatgtaggttaaaggtgtttagttttttttttaagtaaatgggtagatgtattttatatatgtttttagtgaagggttgggtgtggtggtttaagtttgtagttttagtattttggaaggttgaggtgggtggattatttgagattaggagtttgagattagtttggttaatatggtgaaattttgtttttattaaaaatataaaaattagttgggtatggtggtgggtgtttgtaattttaggtatttaggaggttgaggtagaagaattgtttgaatttaggaggtggaggttgtggtgagttgaaattgtgttattgtattttagtttgggtgataaaagtaagatgtagttttttgttgttgtttttttaattgttaatgaggaaaggggaagttttgtgttaggtgatagagatttaattgttgagtaggtttttttgtttgtggttttttggttggtttttagatgtttaggtggttaatattagagtttgtgtagtagtgtgaggtaatttattgagataggttgggtttgtggagtttggtgagtagtggttttttttttggggtttttttttaatttttgggatatttttttgatttggagtttttttgttttattgttaggtttttttgtagattgtaagtttatttgttattattgttgttgtgtgtttgtttgtttggattgttgtgggttttgggatttgggttgggaatttgtggtggagtgggatatgaatgtggtgagtgtggggttgagggtgtatgggaagggtgaggatgggtaggttatagtgtaggtatttttgagggttgtttgggtgttgtgtgtaaggagtgttttaattgttgattttttggtggtatagagaggttaattttgtgtgggggttgggaggggagtttggattgttggttttgtaagtattttatttgttgtaagtggatttgggtttaggttgatttaggttttgtgtatgtgtattttttgtatttttttgtttttgtttttggttagaggttatttttgtgtgtttgtttggatgttggtatttgtttttgttttttgtggtaggtggggtttgtgagtggagttttggagtgatgaggttatttttgggggtgaagtgtgtgtgtttttgttttggtgtttttgttttaatgagataagagttagattttggtgatttatgttttagttttaatggttgtggtgtggttttggtttgggtgtatgtgtatattgatatgtgtatatgtatgtatgtgattggggtggtggttggtggttatggatgtgtaggattgggggatgggtgggtatggttatgggtgaggtggaggtgtttttttttgaaatgatttggagtagtatgatgagtagtggttattgtagttaagaggatttggatttggagtttgagtagtattttattgtgtgaattttgttagtttgtaggttgtgttgggattaggtgggagttagggggtgttggtgggtgggaggggaagtggttgttggagttttgttttttttggtttgttgttgtgttttgggttggtgggtagttttatttttttggttatgtggttttttgtgggttttggttggggatttgtttgtggaattgtgtgtaagattttgattttattgtttagatgttgggtgttggggtttttttggtttttgttatagataggttgaatatggaaaaagtagttgtatggtttgtggtagatttgagttgggtattatttagttatgattaaagttgattgagtagtttggattagtattttgatttttgtgtttgaatgtttttgttttttttttggggagattaggggaggatgtggagagggaagagtttttgttaggaattgagaagtatgtttaggaaaatttgagaggtagagagagattttgtttttttatttgtatttttgtatggagttagttgagtttttattttttttttgttttggtttgttattagttgttggaatgtggaagattttgttttttttttttagggtggatttggagaaagatttgggaatagataggaaagaagttttgttttggattataagtatttaggagtattttatttataggaagggggaaagttagattataaaatgtttaaagaggtggaaaaagagatttaggttattaatttaggattgtaaggtgttttggaattttttaggtatttttattattggagaattgtgtgttagatgttattggtgtgattattaggtttagagaattaggtttaggtattaggaaaaagaaatagggattgtgaagtttagtatgtttggtagaaatggggtggaaatttttatttaagtaaagaaagtggagttgtgagtgatgttttagataaaattttataaaattttttataaaatgggtggtgtttagtatgttaaaattttagtttagagtttgggtgtaagggttgagttgagtgtagatttttgggtttgtttttatgttagttagttttgagttattttttattgtggaaaggtgggaaaattataagatattaattaattgaaaaggagggttagttatggaggtgtatatttgtaattttagttatttgggagggtgaggtagaaggattatttgaatttgggaggtagaggttgtagtgagttaagattgtgttattgtattttagtttgagtgatagagtgagattttgttttaaaaatagaaaaggaagttaagtatggtggtttatatttttaatgttaatgttttgggaggttaaggtaggtggattatttgtaattaggaatttgaggttagtttggttaatatggtgaaattttatttttattaaatatataaaaattagttgggtatggtggtgtgtgattgtagttttagttatttgggagattgaattattttaattgggaggtaaaggttgtagtgagttaagattgtgttattgtattttaatttgggtgatagggtgaggttttgttttaaaaaaaagaaagaaggttgggtttggtgatttatgtttgtaattttagtattttgggaggttaaggtaggtagattatttgaggttaagagtttgagatttgttaggttaatatagtaaaattttgtttgtattgaaaatataaaaaaattatttggttatggtggtgtgtgtttgtaattttagttattggggaggttgaggtaggagtattatttgaatttagaagatagaggttgtagtgagttgagattgggttattgtattttagtttggatgagagagtaagattttgttttaaaaaaaaaaaaaaaaaaaaagaaagaataggaggttgagaagttttaagttatatgttaaaaaaaaagaaaaaaatattagttttaggttaggtgtagtggtttatatttttaattttagtattttggaaagttgaggtgggtggattatgaggttaggagtttaagattagtttggttaaaatggtgaaattttgttttgattaaaaatataaaaaattagttagttgtggtggtaggtatttgtaattttagttatttgggaggttgaagtagagaattgtttgaatttaggaggtagagattgtaatgagttaagattgtattattgtattttagtttggaaaatagagtgagattttgttttaaaaaaaaaattattagtttttatggatagtggtagagtggagggtgggtttttatggtgtagaagggaaattttatggttttgttgtgtatttgattgggatggttgttgaaatttttttttagtaggtagttttggaaatagaaaaagaaatttttttttttttagaattttggaagggttgtgtagtgtttttaatttaagtttgttttttgagtgaagatagggaggtttattattagaagggaaggggttggaaatgaggttattgtattttagtttagggtttttgggttatttaggaagggaagaaggagtaagtttttttattgttaggtaggagtttagagttattataagaataagttagtattatttttgtgttttttttgttttgtaaataaaatgatttttttttttgttttggtattagagtttgtttggtattttttttgtttttagtattttttttatttgggtatttttttttgttggtgtattgaataaatatatttattgttttatttatagtttttagtttttattttttagggtttatattatttgtttttattaatttgataaggttgtttattgtttttagtaaggtttgtattggggtttttattttagtgtttttttttatttaggagatttttggatatttggggaagaaaatgagtttaaatttttatttttttttttttattttttttttgtaaggttttggttttagtttttagttttatatttttgttggttgtagaatagtagtgggttttgggtaaggagtattttgttaaaatgttttattttgtttttttatttgttttttttatttgtttttattagatggtttaagtgtttaaggggattttagggtggagttagggagaattttggtttttttgggttaggtataagattattttataggaaattttgtgggaatttttttgggataaagtattggttagtgttgagtttagttgtgtttgtgatatttgtattttaattagggtttatttgatgttaataggaagtaaggttgatgtagtggggttaagggagtttgggagaagaaagttggtttagagttttggttgttttgttttatattttatttttttggtaagaatttagtttttagatgaggtggggagtgagtggttgagttaaaaatttttgggttgggtatgatggtttatgtttgtaattttagtattttgggaggtgaaggtaggtggattatttgaggttaggagtttaagattaatttggttaatgtggtgaaattttatttttattaaaaatataaaaattagttgggtgttgttgtggtatgtgtttgtagttttagttatttgggagtttgaggtaggagaattgtttgaatttaggaggtagaatttgtagtgagttaagatttagttattgtattatagtttgggtgatagagtgaggttttgttttaaaaaaaaaaaaaatttttgggttaaatttttagatagtataggtaggtgtagaaatttattaggaagttgtttgtgtatttttggtagattggagtttggtttaaagttgttttttatgtagtttgggttaaggttaaatattatgttatagtgattttttttattatgtgtgagatatggagaattggttttaagtattattttgtttattggtggttggattattgatgtgtattattttttattttttttattttgtagtgggttatggttttgtgttggggtagaggagaaaaatgggttgttttttttaggataaatttttattttaatttaattagggtgttgtgattagaatgtgtaattgaggtgtgattttattgattttttttttttttgagattgagttttgtttttgttgtttaggttggagtgtgatggtatgattttagtttattgtaatttttattttttgagtttgagtaatttttttgttttagttttttaagtagttgggattataggtatgtgttattatgtttggttaattttgtatttttagtagagatggggtttttttatgttggttaggttggttttaaatttttgattttaggtgatttatttgttttggttttttaaagtgttagaattataggtgtgagttaatgtgtttagtttgtttttgttttttgtgttttgaagtagggttttatttagttttttaggttggagtgtagtgatatgataatagtttattgtagttgtaattttttgggtttaaatgatttttttattttagttttttgaatagttgggattataggtatattattatatttggttaatttttttttttttttttttagtagagatgaggttttgttatgttgtttaagttggttttaaatttttgaggattaagtgatttttttattttagttttttaaaatgttgggattgtagatgtgagttattatatttagtttgattttattttaaatgagagtttttttttagagttttttagttgtttttggtttttggttatgtgtttttagttgtttttgtttttgtggtatttttaaggttatatttagtgttgaggttttaggtaggtagtagagagaagttaaatgattttgttttttttttatttatttagagtatgtaaaattaggagtagtggtgggtttagggtgggtattagttatgtatatgtatattagggatagggggttaaaggtagttagtttttaaagattgttttagaggttattttttagagaagttttgggttttttaagggttttgtgtttatgttggtttattttgtagg

SEQ ID NO: 382 - DNA, 10224 bp, Artificial Sequence
  chemically treated genomic DNA (Homo sapiens)
tttgtaagatgggttagtatggatatagggtttttgaggaatttagggtttttttgaaaaatggtttttggggtagtttttggaaattgattgtttttggttttttgtttttgatgtatatatatatagttggtgtttattttgaatttattattgtttttggttttgtatgttttgggtggataagggaaagatagaattatttggtttttttttgttgtttgtttagggttttagtattgaatgtagttttaaggatattatagaagtaggggtaattgaaggtatatggttaggggttaggaatagttgagggattttgaagagggatttttatttaaagtaaaattaggttgggtgtggtggtttatatttgtaattttagtattttgggaggttaaggtaggaggattatttgatttttaggagtttgagattagtttgggtaatatagtaagattttatttttattaaaaaaagaaaaaaaaaaattagttaggtgtggtggtgtgtttgtagttttaattgtttaggaggttgaggtgggaggattgtttgagtttgggagattgtagttatagtaagttattattgtgttattgtattttagtttggggaattgagtgagattttgttttaaaatataaaaaataaaaataggttgggtatgttggtttatgtttgtaattttagtattttgggaggttgaggtgggtggattatttgaggttaggagtttgagattagtttgattaatatggagaaattttgtttttattaaaaatataaaattagttaggtgtggtggtatatgtttgtaattttagttatttaggaggttgaggtaggagaattgtttaaatttgggaggtggaggttgtagtgaattgagattgtgttattgtattttagtttgggtaataagagtgaaatttggttttaaaaaaaaaaaaaattagtaaaattatattttaattgtatattttgattatagtattttagttgagttggagtgagggtttgttttggagaaggtagtttattttttttttttgttttggtatggggttatgatttattgtagggtgagaggagtggagagtggtgtatattagtagtttagttattagtggatagagtagtatttggagttagttttttatgttttatatatagtgagaaaaattattgtgatatgatgtttaattttgatttaagttgtataaaaggtagttttaggttaggttttaatttgttagaggtatataggtagttttttggtgggtttttgtatttgtttgtgttgtttggagatttggtttaaagattttttttttttttgagatgaagttttattttgttgtttaggttgtagtgtagtggttggattttggtttattgtaagttttgttttttgggtttaagtgatttttttgttttagatttttgagtagttgggattataggtgtgtgttataataatatttggttaatttttgtatttttagtagagatgggattttattatattggttaggttggttttgaatttttgattttaagtgatttgtttgtttttattttttaaagtgttgggattataggtgtgaattattgtatttgatttagagatttttaatttgattatttattttttattttatttagggattggatttttgttggaagggtggagtgtgggatagggtagttagggttttgaattgattttttttttttagatttttttggttttattgtattagttttattttttgttgatgttagataggttttagttagaatgtgagtgttatagatatagttaagtttagtgttgattaatattttgttttagaagaatttttataaggttttttgtagaatgattttgtgtttagtttaggagagttagggttttttttgattttgttttggagtttttttaagtatttaaattatttgatggggataaatggagaggatagatgagggagtagggtggagtgttttagtagaatgttttttatttagaatttgttgttattttgtagttagtaaggatgtggggttaagaattaaggttagggttttataggaaaaaggtaaagggggaggggtgggaatttaagtttatttttttttttaagtatttaaaggttttttggatggagaagagtattggagtaaaaattttagtataaattttattggggatagtgggtaattttgttgggttagtaaaaataaatggtgtgggttttggaaaatgagggttggaggttgtgaataaagtagtggatgtgtttgtttagtatattaatgggaagaagtatttagatgggaggagtattaggggtaggagaaatgttagatagattttagtgttagggtaagaaggaagattattttgtttgtagaatagggagggtatagggatggtgttaatttgtttttgtgatggttttgagtttttatttaataatgagaaagtttgtttttttttttttttttggatgatttaggagttttgggttgggatgtagtgattttatttttagtttttttttttttggtgatgaatttttttatttttatttagaaaatagatttggattagaggtattgtatagtttttttaggattttaaaggaggaagagtttttttttttgtttttaaagttgtttgttggaagaggattttaatagttattttagttggatgtatagtaggattatggaattttttttttgtattatagggatttattttttattttattattgtttataaaaattgatggttttttttttgagatagagttttgttttgttttttaggttggagtgtagtggtgtgattttggtttattgtaatttttgttttttgggtttaagtaattttttgttttagttttttaagtagttgggattataggtgtttgttattataattggttaattttttgtatttttagttgagatggggttttattattttggttaggttggttttgaatttttgattttatgatttatttattttggttttttaaagtgttgggattaaaggtgtgagttattgtatttggtttaaaattgatgtttttttttttttttttaatatataatttgggattttttagttttttattttttttttttttttttttttttttttgagatagagttttgtttttttatttaggttggaatgtagtggtttagttttgatttattgtaatttttgttttttgggtttaagtgatatttttgttttagtttttttagtagttgggattataggtatatattattatggttagataatttttttgtatttttagtatagatggggttttgttatgttggtttggtaggttttgaatttttggttttaagtgatttgtttgttttggttttttaaaatgttgagattataggtatgagttattaagtttagtttttttttttttttttgagatagagttttattttgttatttaggttggagtgtagtggtatgattttggtttattgtaatttttgttttttggttgaagtgatttagttttttaagtagttgggattatagttatatattattatgtttggttaatttttgtatgtttagtagagatagggttttattatgttggttaggttgattttgaatttttgattgtaaatgatttatttgttttggttttttaaagtattggtattagaggtgtgagttattgtatttggtttttttttttatttttgagatagagttttattttgttatttaggttggagtgtagtggtatgattttggtttattgtaatttttgttttttaggtttaagtgatttttttgttttatttttttaagtagttgggattataggtgtgtatttttgtggttagtttttttttttaattggttagtgttttgtggtttttttatttttttatagtggaaaatggtttaggattgattgatatgaagataagtttaggggtttatatttaatttaatttttgtatttaagttttgggttaagattttggtgtgttgagtattatttattttgtaaggaattttgtaaaattttatttgaagtattatttataattttattttttttatttaaataaggatttttgttttatttttgttaggtatattgagttttatagtttttgttttttttttttggtgtttaggtttggttttttgagtttggtggttatattaatggtatttggtatatagttttttgataatggggatatttaggaggttttgagatattttatagttttgggttagtaatttggatttttttttttatttttttaggtattttataatttagttttttttttttttgtgggtaaagtgtttttgaatgtttatggtttaaaataagattttttttttatttatttttaaatttttttttagatttattttagaggaagggaatagaattttttatattttagtagttggtgataggttagaatagggaagaggtgagggtttagttggttttatataggagtgtagatggaggagtaggatttttttttgttttttaagtttttttaaatatattttttaatttttggtgaggatttttttttttttatatttttttttagtttttttaaggagggagtaggagtatttgaatgtggaaattgaggtgttagtttaaattgtttggttggttttagttatagttggataatgtttggtttaggtttattataagttatatagttgttttttttgtgtttaatttgtttgtgatagaaattaagggggttttggtatttagtatttaggtggtggaattggggttttatgtatggttttgtgggtaggtttttggttaggatttgtggggagttatgtagttaggagggtggggttgtttattgatttaggatgtggtaatggattggggagggtggagttttagtgattgtttttttttttgtttgttggtattttttggtttttatttggttttggtgtggtttgtgagttagtgaggtttgtgtggtgaagtattgtttgagttttgagtttgagtttttttggttgtagtagttattgtttgttgtgttgttttaggttattttgaaagaaggtgtttttgttttgtttatagttgtatttgtttgttttttagttttgtgtgtttgtagttgttaattattgttttggttgtgtgtgtgtgtgtatgtgtgttagtgtgtgtgtgtgtttgggttagagttgtgttgtaattgttaagattgaaatgtagattgttgggatttagtttttgttttattggggtaggaatgttggggtggggatatgtatgttttgtttttaggaatgattttattgttttggagttttatttatagattttatttattatagggaatgggggtgggtgttagtgtttgggtaagtgtataagagtggtttttggttggaggtgagggtgggaaggtgtgggaagtgtgtgtgtgtggagtttgggttagtttgggtttgggtttgtttgtagtgggtggagtatttgtggagttggtaatttaggttttttttttagtttttgtgtagaattagtttttttgtgttgttgggaaattggtaattagaatgttttttgtgtgtggtatttaggtagtttttgagaatgtttgtattgtggtttgtttatttttgttttttttatatgtttttggttttgtgtttattatgtttgtgttttgttttattgtgggtttttagtttaggttttggggtttgtaatagtttaggtagatgagtgtgtggtagtggtagtggtaggtgaatttgtaatttgtagagaggtttggtggtgaggtggaggagttttaggttggggaaatgttttggagattgaagggaagttttagggagagggttgttgtttgttaggttttgtaggtttgatttattttagtgggttattttatattgttatgtggattttaatgttggttatttgggtgtttggaaattggttggaaggttataggtagagaggtttgtttaatagttggatttttattgtttagtatagaattttttttttttttattggtaattaaaaaaataataataaaaaattgtgttttgtttttgttatttaggttggagtgtaatggtgtgattttggtttattgtaatttttgttttttgggtttaagtgatttttttgttttagttttttgagtatttaggattataggtgtttgttattatgtttagttaatttttgtatttttagtagagatggggttttattatgttagttaggttggttttaaatttttgattttaggtgatttatttgttttggttttttaaagtgttgggattataggtttgagttattgtatttggttttttattgggaatgtatatggaatatatttgtttatttatttgaaggaaaaattaaatatttttaatttatgtttgttttgtggttgttatttgtttttattttttttagattaagatattggtttttatatattttaattttttgtttttatttttttttttatttattttagttaggtttgtttttttttttaggaaattgtttgggatagggtttttagtgatttgtgtattattaaatggaatttagtgttttattttttatttttatttttttagtattatttgaagtttgttttttttgatttttaggggttatatttttttagttttttttttattttttgtagtttttgtttagtttttttgtagattttgatttaatttttatattttatgatgaagtttgggtttagttttgattattggtttggtttgtttatatttatttgttttagatttatggttgaaatattgatttaaatttttagattagattttttgtgttagtatttttattaggatgtttaaaagatgttttaagtgaatatggttaaaatttaatttttttttttttagttttattgttatatttgtttagttttttttttgtagtaaaaatggttattaggtttttagttattggagataaaagtttaaatttatttttgattttttttttgtttttatttttgataaatatgtttaaattattttgttttttatttttatggttattttatttttttttgagaatgttgtaatgttttagttttgttttttttttttttttttttttttttgagatagagttttattttgttgttaaggttggagggtagtggtatgattttggtttattgtaatttttgttttttgtgtttaagtaatttttttattttagttttttgagtagttgggattataggtatttgttattatgtttggtttatttttttttattttttagtagatatgaggttttattatgttggttaggttggttttgaatttttgattttaggtgatttatttgtttttgttttttgaagtgttgggattataggtatgagttattgtgtttggttttttgtttattttttgtattttgttataattttgtgttttttttagttgaatttgtgatgtttttttgtattggatgagagggtttttatgtatatatagatttgggatattatttatttataagtttttaaataggttagagtagtgatgtttaatttagattttatgttataataatttggggagtttttaaaatttattgatgtttagggtttatttttagtagttgatttaataggtttgtggtgggatttaggttagtggggaggattgtaaaagtatttttggtgattttagttggtgtttatttaggggagagtaatttttgtttgttggtgatttttaggggtgtagaaggattgttgggtgtgtggttgtgtgtatattttagtatttgatttattgggttagaaaagggtgtttgttaaataaagatttaataaaatttttgtttgtagggggtttattaaaggttttaaatttttttaggtttttttttataggtggtaatttttttttattttaaaggttttggagggggttatgagtgtttgagaagaggtaagtttgggaagatggattttgaggatagtaggtataaatttttttttaagaagggttaaggtattttaaagataagaaatttaaaattagtgtatttttatatataagtagttatttttgtttatttgtggtttagatatgagtggagtgtgataagggataaattatttttgtgtattttttagtgatggggtgaaagtaatggatttagtttttgggagttgtttttgttgattttttttgttgtgatttgatttgtggtgattgtgttgttttttggttgttttttttgtttttgtaggtgtgtggggttattatttatgtgtgtattgtaggtttttgtgtatgatgttttagatgaagttgttatagaggttgtattatgtgtgtgtggtgggttttgtgggttggaagtggtggttatggttagggattagttgttgtgtggggttgtatgtggtgttttgtgtgatgtgtagtgtgttggtatgttttagttgggtgtggttttttttagtgtgtttagtgggtgttagtttttgtagtttaatgagtttaggtttttttgatatggtttggttgggtttgtgttttgttggttttgggtgttagtaagtgtgggttgggtggggttatagggtgggttttgattttagtgttttttttaggatttagattgggtggtgggaaggagttgaggagagttgtgtaatggaaatttgggtgtagggattgtggggtttgaaggtggggttgggtgtgtttttgtagagttttttttgttttgttttttttttttttttttgttttttttttatattttattttggatggttataatgatggtgattgtaaagtattatgtggagatatttgtgtttttggaggttagttttattgtgttagaggaagagggtttttatatttggttttggtttttttggtttggtttgttgaagtaatatatttggtttatttattgggtggggtaggaagttttgagtttttatttggggtgaggaggagggagattggttagtagttttattgtttgttttgttttttattgtggagattggggttttggtagaggttggattgtgattttgaggtttaggggtgtattttgggtggatttttttggtatgggtggttggtttttagtaattgtagtttttatttggttttgttattttgggttgttaggatataagtttttttatgttttttttagtgtttgatttggtattttttgtaggtaggtgggtattgaggatggtaatgtatgtgggggatgtgggagtagggtttagaggtttaaggttttaggatatttttatttgtagtaatattatttattttggtattgtgagtagtgtttagaagtttttgtattgtagtaagtatagtggggttgttttggagttattgtttttagtatatttagtttgtaggttttagtttatttgggggaaagttaggaaggtttgattggttttggaaggtgggggtattttatttatatttatgttttttgtattttttttattttttttgttatttttataggttttatttttgtgtttgtagttgtaggttttgttttgaggggttgaatatatgttggagttggtgtttggtaattgtttgttatttgtttttgtttttttgttttagttgtttttagatttttgggatttaggagagagaagtggagagtggtaggaaggtgttggtaaagtgggatagtggttttgagtagttaattttttagtgtttatttgttttaatattaggttttttttaggaggttgggttttagttagggttagatgggttaggaaattttgtaagtgggttaggttgggtagttggtttagtagtgtgtttgtgaggaaggtttgaagttgtaagggtgtttagtggaggttagtgtgatgtaggtgttggttagggggttaaggaaaaggaaggggttgggttgggttgagaatgtttgtgggggtttatgttttattagttggtgtgttatttgaggtttaaggattgaaaagagtattggggttgaggtgggtgggtaaagataaatagtagggatgtagttggggtaggatggggagggtggtattggggttgtgggggtt

SEQ ID NO: 383 - DNA, 11787 bp, Artificial Sequence
  chemically treated genomic DNA (Homo sapiens)
tgtgaaatattagttatgaagaaattttgataataatattttagtgtagaattgtatattagtaatagtatgtttggatttttttagatatgtggtattaatatatgtttggaattttaagtgttagattaagaagaaaaatttaagatataaagtggtgttttaataatttgagttttattatttttaatgttaagaaattattatatatataaattttatgtttgtaattttagatttattgttgtataggatttttggtaattataagttagttgtattaagtaaattttgatttatttggttggtggttttgtgaatgataattatttttaggtgggtttaatggaaggttggagaaggtattgtttgataagttatattttgttagttttagaattttgagtgaatgttgttgttttgttttgtttgtttttatattgtaaattggttatgagtttatttattatttttttttgttgtgaatttttagtaatatattttattaaaagattttttttgataaagtagatttttatgagttgaaatatttattgattttaatgtttatttttagatagttttgtataggaatttttatgtttaaggatagttgattttggtaaattggattttttaaaaattagattatagaatttttgtttgtaatttttttatttaaggaatatttagataatttggtttggagagaagattattaaatttttttttatataataggttttttttattaggtttgtaagggataaatagtgaatatttatttgtaattatgtaattgttttgtagagtaagtgtagttataagtggtaagaaatgaatgagtatggttgtgttttaattataattattatggatggatatatttgtattttttatgttagatggaattttgttttgttgtttaggttggagtgtagtgatgttattttgatttattgtaatttttgttttttaggtttaagtagttttgttttagttttttaagtagttgggattataggtgtatggttaatttttgtatttttattagagatggggttttattatattggttaggttggttttaaatttttgattttgtgatttgtttgtattaattttttaaagtgttgggattgtaggtgtgagttattgtgtttgatttaggattatatttaaatgatttataaatgtaaaaattatttttatattatagatttgatttaaggattgtagtttgttgtgtttttgttttttgaatgggatgtggtggtatagtagttgggattatagttatatattattatgtttatttaattttgtatttttagtagagatggggtattattatgtttattaggttgattttgaatttttgattttaggtgatttatttgttttaattttttaaagtgttgggattataggtgtgagttattgtgtttggtttgtatttttatttttaaattttagtatttttgaataataatgggtagagaaatatttgtagtagttgtttataatagagtgaaataaaaagtttgaggaattgttaatagaaaaatgggtggttgtggggagtattgggatttgtatttgtatataatttagggtagtttttaatgagtttatgagttatttagggattttattaaaatgagattagttttgagtggggttttttttatagatttttgttattatattttgaagagtaagggtttagttgattttaagtaggtgtgtatttttttggatagtgtttgtagaaaaatagaattatatttatggattttatgattatattgttagttttttggttaaggggttgagttaggtatttattgtagatagaaataaagtagatgtatgtttattagtgagtattgagatatttagtatggttatttatgaattgaagtttggtttttttttatttattaattgattattttttattttaagtaagtattttatattttgtatattagtatatttttggattttgtttttttatatggtttgatattttgaatattagattatttaagagtgagatttaatttatttttaaattgtttttaaaattagggaaataaaagagaatgaaattgtggtaattttttttttttttagttattagatgtatgttatttatggtgggttttggtttttttaaagataattggaagattttattggattgatagagagaaattgtgtaattttattttagtatgttaagatgaagaaatggggggatttgtagataggttaggagatatggtaagtaatatttttgatatatttttataaattattttagtgtttgtattattttatggttttatggatttttagggtggtattttgagtgttgttttgaaagtagtttttttttttatttattgtagagtgtatgaaggatatagaataattttatagaaattttttgttgtttgttgttaataaaattagtatatggtaaaggttaggtatttataatttgaagttaaagaagtttttattttgtgatttgtatataaatttttttttaaataggtggattttttttatattttatttggaattgttggattgttatttttgggagaagaatagattaaatttgttaattttgttttttgtatgtttgaagaagtgttttagagagtgaatgtttagtttgagttagtgagttagatttattgaattgaaagttgtatagtatagttttgttattttaatatttttgtatttgaagtgtttattgaatttaaaagtgattattgttaatattttgtatattgtgttaaattaattttaataaattatataattatatatattgtaaaataaagattggtattttattttttgttttttattttgaagttttgttattttgattatagttttttgtgtatatttttgtgtttgttatgtttaataattgagttaatataaaataattttaggtttttatttgattttttttttatgtatattttttatttgttttatagtaagttgatgtaaattggtttgttaataagaatgttaattgatgaaagtggatagaatttatatatgaattaaatgatgtataaaataaatggttgttgaaatttggaaatgattgataggtttgaatatggttattttgaattggttatagatttaggttaaatggtaatttattattttaaaatggggttgtgatttggattgttttttttttttttttttttttttttttttttagtattttatatattagaattatttaaagaaggagttgtttttaaataaggaaatattaatgggtaagttgatggttattatagtatttttttgtatttgttttttttttaaaaagttaaaatgggtataattatttttttttatttttttgtgatagaatttttgttgtttaggttggagtgtagtagtatgattttagtttaattgtaatttttgtttgttgggtttaagtaatttagttgtagttttttgagtagttgggattatagttgtatattattatgtttggttaatttttatgttattttagtatagatagggttttattatgttgaggagttggagattagtttgattttgtgatttatttattttggttttttaaagtgttgggattataggtgtgagttattatgtttggtttaaaatgagtataattattttaggggtttatagttttggtgaaagtgaggtattttttatttttaaattttattttttagagatagggttttttttttttttttaggttggggtatagtagtgtaattatagtttattgtaattttaaatttttgggtttaagtagtttttttattttagttttttgagtattagggtttataggtatttgttattatgtttattatgtttagttgattttttaattttggggataggtattgttttttttaggttggtttttggaggtgaagtaattttttggttttagttttttaaagtattgggattatagggaggagttattgtgtttgatttgaaaataaggttttttgatggaaattgagattttttttaagtatgtttggaatgttttgtgtaataattattttaagaatagagatgtttttaaggattgttgttattgtatgtgggtaaattgttgtgtataattggtttattgagatatttaatagtggtaggattttagtagtggtgtaaattaatgttttttaatagtttttgtatggtagtatttagataattttgttatgtttaatttatggatttttggtaagttggtattattggttttatttaaggaattttttaaaggttattattgtaaagttggagtttgaatttttagtgtgttattaattgatttatatgttagaaattatagtattagaaattggtagatggggaattgttaattgagagattttatttagttagtttttttttgttttttattttattatgtatatagttatgtgtatattattttttgataatataattattttttttatatttggttataagattaattttaggtgggttatgttgtgtgagtattatatgtttttattgtgttaaaggtattgggtgtattgtgttgggtggtttttatatttaaagataagttagtgtgtttggatgtgtgggaaatgtatgtaatatttgtaataagggagattgggtgttgtgagaataatggggttaataaattgggtggttattgatgggttttgtagagttttggttagtttgatatttgtaggttgaggatgttttagtgaggtttatgtggaaagtgatgggtttgggaatggttggaagtagggttatagatttgaagtatgtgaatttatgtggaaagttgagtttgtttgtgtttgtgtagtgtagtttagtgtgttggtgtgtagtttttttgtttgttttagtggtgtagtttttgtagttgggttattggaggggttgtttagaaattttatattttttgggttagggaaggtttgggaggatgttgaggtttgagattttattaattttgttttttgttttggtggtttttttgttgttgggagaaatttgtttattttagggtttttgttataattttggattttaggagattttatagagttgttttttggtttaggtggtttttgtatttatttgttttggtatgttaggagttgtgggtgattggagtagtagtagtagtagttttttttgttttgtgttaaatttttggttagtttaaggtaaggagtgattgggtggaggagtttttttgaggttagaggttggtagtttatggaggtttgggggtatgtgggtggtggttattatagtgaagttgtgatttggttggggtgtgagatttgagtgttttgggaatttggtgagtttgggtgattagaagttttgattttttaaattggttttattgtaagattttgattgtggatggtttagttttgagaaaggttgaagtattttatataatgttttttatagtgtttgataaatgatagtttgtgtgtgagtttgttgatagaagttgtgagttgatttttggttgttgaatttaattttttaaattttgttaaggtgggataaaatagattaaattgaatattttatttaatttagggaaaataatatgtttagtattaaaagagtgggttgggtggtggttgatgtttgtaattttagtattttgggaaattagggtgggtggattatttgaggttgggagttttatattagtttggttaatatggtgaattttttatttttattttttatttttattaaaagtataaaaattatttgggtgtggtggtatgtgattgtggttttagttatttaggaggttgaggtgggaggatggtgagtttgggaggttgaggttgttgtgagttgagattgtgttattgtattttagtttgggtgatatagtgagattttgatttaaaataaataaataaaaaagatgtatgttttttaaattatttattattttgttagtttttatttatgataaagtattattattttttatatatgattgtaatataatggtaaagtaataaatattaaatttaatggttattttttagtttattttatgtgatttttttgttgtatttaatgtttttaatttttttatttttagaaatagagttttgttatgttgtttatgttggttttaaatttttggttttaagtgtttttgttttggtttgtttaagtattgggattataggtatgagttattgttgtttggtttatgtttaatgtttttgattggtttttttttaaatttttttaatttggtttttttgattttatttgtttttgtttttttgttattttttagagaattgttgtgtttatttttgtttttaaattatgggtatgttattaaagtttttttttttaggttatttttatttagatgtgattatttttatagtttagattttatttatattttagatttattttagattgttttttgaagtttttattgatggattaatggatattttaggttgattatatgattaattaaatttttttttgtattttttttttttttttgagatagagttttgttttgttgtttaggttggagtgtagtggtatggttatgatttattgtagttttaaatttttgggtttaagtgatttttttattttagttttttgagtagttgggattaaggtatgtgtttttatagatggttaatttaaaaaatttttttgtagagatagtgtttttttatgttgtttagtttggttttgaatttttaggtttaagtgatttttttattttagttttttaaaatgttgggattataggtgtgagttattgtatttagtttttaaatttttaagtgtttttttatttttgtagtttatttattgtattattagagttatgtggaaaatgattttattatgttttttgttatttaaattagtagatttgtatttgtaggtaaaagattaaattttttagaaggatagttaaagtaattgggattggtttttaatttttatagatttattttttattatttaatatttattttgttttttaataaaattgagttatttgtaatttttttaaagtaatatgaatgtttatattgttagtttaatttttttttttattagatgtttggttatttatttatttattagtaatgataatatttattaatttatatgtatttattttgttttggttttttattaggtagatggtatttttgatttttataataattttgtagagtagattttttttttgtttttgttttatagatagaattaaggtttaaataggtgaataaaggtttaaattatgttagtagttggggataataatttgtgtttttaatgaatttaaggtttagtagagaagatagatttaaaaattaataaatatatatttaagaaataattgtatttgaggtatttataatttttgaggtaggtataattaaagtatggggataaaagtgggaaaagatattttatagagtaagtgtattttgaattggtttttaagaataagtaggaagaagaatgttagttaaagggaaatagttggagtgtatttttgagaaaaatatgtgtaaaggtatagaagaattatgtaaaattgttaataattttgtttggttagagtaggagagtgatttaggtagataaatttgaatgtagatatagttgtgagaattagatttgggagataaatttaatttagagattttttatatttaatattaggtttttggttttggtgattggatagatggtagtagtattttttgattttgggaattttgtaggtaaagtaaattttagagggaagatgatgagttttgttatggatatgttgagtgtgaaaagtttgtgggatatttatatatttatattaagataattgaatataggaaattagagttaagaagagagaaatttgagggaaatatggatttgaaagttattagtatgttgggattatagtagagaatatgaagattatatagtaaaatagaggttaaggaagtaggaggagaattaagataagtgaatgagttttaagaaagggtatatagtttaaaagtagtttgagaataagaaatagttttttttatttttagtttttgtatttttagtttttggtaattatttttttttttagttttttaaagtttagaaatgttaatggagtatattttatgttggttttatatatgtttttatgatagtatttttatattttgtttatatttttgtaaatattttttttattaaattattttagtttgagtatattattgatttttgttggaatttatataatgaagttatattttattttatggtgagtatggggagatatataggaattgtaagaaagagagatattgattagatttgttttttagaaagattattggtgatgatttgaagaatagattagagaggtgtaatattggaagtaaggagaagaagaagtaggaaatttgtataaggattaaagaagatataggtttaaaatgggttgggaggagtagagagggatttaaattttagtgatgttaaaaaaaaagaattttagtatttagttattgagtgttagggttgatgaaggaagaattgagaatgttttttaagtttatgatttgagtgataagggataagttggtataattaattatattggtaataaagaattaattttgagggaaagatagagtttatttttggatatttagaatgttgggaagatatttaaaggtttatgtttaagagatagatatagtgatttggagttatattgtttgatagaatattttgtgataatagaaatgttttatatttatgttgtttgatgtggtaattagtagttgtatgtggtttttgagtatttgaaaatgttgttagtgtgattgaggaatagaatttaaattgtatttaattttgatttagttaaatatttatatatgttgttttattgaataatgtaggtatagagttgagaatggtttttgtatttttgaaggattaaagaattaagaatattttgtgatattaaaattatatgaaatttagaatttaatatgtagaaataaagttatttttaattgaaatatagttatttttatttatttatgtattatttatgattgtttttttatgatagtgttagagttgagtaattgtgatagtgattatatggtttataaaagtttaaaatatttgttatttggttttttatttaaaagtttatgggttgggtatgatggtttatgtttataattttagtattttgggaggttgaggtgggtagattatttgaggttaggagtttatgattagtttggttaatatgataaaattttgtttttattaaaaatataaaaaaaaaatagttaggtgtggtgggtatgtttataatgttagttgtttgggaggttgaggtaggaggattgtttgaatttgggaggtagaggttgtagtgagttgagattgtgttattgtattttagtttgggtaataagagtgaaattttattttaaaaaaaaaaaaaaaaagtttatgttgaggtatggtggtttatgtttgtaattttagtgttttgggaggttgaagtgggaggattgtttgaggttaggtgtttgagattagtttgggtaatgtagtaagattttgtttttataaaaaaaaaattagttgtgtgtggtgaggtgtatttatagtttatagttatttaagaggttgaagtaggaggttatttgagtttatgagtttgaggttgtagtgagttgtgattatattattgtattttagtttgggtgataaagagagattttgtttttataagatagtaaaatagattgggtatggtggtttttgattataattttagtattttgggaggttgagatgggaagattatttgagtttaggagtttgagattagtttgggtaatatggtaaaattttatttttataaaaatataaaaaattagtttggtatggtggtatgagtttatagttttagttatttgggagggtgaggtaggaggattgtttgagtttaggagtttaaggttgtatttagttaagattatattattgaattttagtttaagttatagaatgagagttttatatatagataaaaaggaaaaattaaaagtttagtaatttttggtttatagtttaaggagttgttatagttatatatgaaggtttgagagttgttagaaaatagatgttaatagaaataaagaggagagatgagatgtttggagatgtataatgttgatttgtgagggaaagtttaaaagtatgaagttttggaggttaatagttaagaagtagaggaaaaaggagatggtaaaggaaattaaaagtggtttaaagagaatttaagatagagagttgtggaaattaaagagaataggtgaatagagtttaaatattttaaaatttttttagaatttttatgtgttaagaggttatgttaggttgtttatgtatattatttaaaaattttatgataattttgtaaaataggtaatagtttatattagtagataagtatttaaataaggaattgaagttaattgagtttaaaatgttatttgtataggggagagaaatttaatgaagaaattaatagaagaaggttaaaagaggtttaataattattatataaatgaaatatatgttttagtttgtattttgttgtttttaaaagaatatttgaaattgggtgattattaagaaagaaaatatattttttggaagtttggaggttgggaagtttaaggttaaaggaggtatatttagtgagggtttttgtgttggtggagtttttgtagagttttgtagtggtatagggtattatatggagagggagttgagtatggtagtttaggttttttattttttttttataaaattattagttttatttttgtgataatttattaatttattaaattatgaatggattaatttatttatgaaggtagagtttttatgttttattattttttaaaggttttatttttgttttgttatattttattggggattaaattttaatgtaagttttggaggggatagatatttatattttagtaatatatttggtatatttgaagattaaagggtaatttatgattttagttagagtagttgtagtgaatttgtagaggtaaaagttatattagtatatttttgtatatttattaataatgttattaattttgttataatttgtttatttttaaaaattatttttatatgaaattttatagaaagtgaatatagtggttgggtgtggtgatttaggtttttaattttagtattttgggaggttgaggtaggtagattatgaggttaggaatttgagattagtttagttaatatggtgaaattttatttttattaaaaatataaaaatttattaggtgtggtggtgggtgtttgtaattttagttatttgggaggttgaggtaggaggattatttgaatttgggaggtggatgttgtagtgagttgagattatgttattatgttttagtttgggtgataagagtaagattttgttttaaaaaagaaaaaaagaaaaaaaaggaaagtgaatatggtataaattataatgattaatatattattgtataatttaaatttttaagaattgattgttaattttttaaatttagg

SEQ ID NO: 384 - DNA, 11787 bp, Artificial Sequence
  chemically treated genomic DNA (Homo sapiens)
tttaaatttgaaaaattaatagttaatttttaaagatttgaattatgtaatgatgtattagttattataatttatattatgtttatttttttttttttttttttttttttttttgagatagagttttgtttttgttgtttaggttggagtgtagtggtatgattttggtttattgtaatgtttattttttaagtttaagtgatttttttgttttagttttttgagtagttgggattataggtatttgttattatgtttggtgaatttttgtatttttagtagagatggggttttattatgttggttgggttggttttgaatttttgattttatgatttgtttgttttggttttttaaagtgttgggattagaggtttgagttattgtatttaattattatgtttattttttataaaattttatgtgaaaatgatttttgaaaataaatagattataataaaattaatgatattattgataaatatataaaaatatgttaatatagtttttgtttttataagtttattgtaattattttggttaaaattataaattattttttaatttttaaatatattagatgtgttgttaaggtatgaatatttgttttttttgaaatttatattgaaatttaatttttagtgaagtgtggtaggatagaggtggggtttttaagaggtgatggggtatgagggttttgtttttatgaatgaattaatttatttatgatttaataggttaatgggttattatgagagtaggattggtggttttataagaagaggatgagagatttgagttattatgtttagttttttttttatgtgatgttttgtattattataggattttatagagattttattagtataaagatttttattaaatgtgttttttttgattttggattttttagtttttagatttttaagaaatatgtttttttttttgataattatttagttttaagtatttttttaaaagtaatagaatatagattaagatatatgttttatttgtataataattattagattttttttaatttttttttgttaatttttttattgaattttttttttttatgtaaatggtattttagatttaattggttttagttttttatttaggtatttatttattgatgtaagttattatttattttataggattgttataaaatttttaaataatgtatataaataatttagtatagttttttggtatatagaagttttaaaaaaattttaaaatgtttgggttttgtttatttattttttttgatttttataattttttattttgaattttttttaaattatttttagttttttttgttatttttttttttttttgttttttaattgttggtttttagggttttatatttttaagtttttttttataaattaatattatgtatttttaggtattttattttttttttttgtttttattaatatttattttttgataatttttaagtttttgtatatagttgtaatgattttttaaattgtaaattaggggttgttaaatttttaattttttttttttgtttgtatgtgagatttttgttttgtagtttaggttggaatttagtggtgtgattttggttaaatgtagttttgaatttttgggtttaagtaatttttttattttatttttttgagtagttgggattataggtttatgttattatgttaggttaattttttgtatttttgtagagatggggttttgttatgttgtttaggttggttttaaatttttgggtttaagtgatttttttattttagttttttaaaatgttgggattataattgggagttattatgtttagtttattttattgttttataaagataaggtttttttttgttgtttagattggagtgtagtagtgtgattatagtttattgtagttttaagtttatgggtttaagtaattttttgttttagttttttgagtaattatggattataggtgtattttattatatatagttaattttttttttatagagatagggttttgttatattgtttaggttgattttaaatatttggttttaagtaatttttttattttagttttttaaagtattgagattataagtataagttattatgttttagtataaattttttttttttttttttgagatggagttttatttttgttgtttaggttagagtgtaatggtgtaattttagtttattgtagtttttgttttttaggtttaagtaatttttttgttttagttttttaagtagttggtattataggtatgtttattatatttggttattttttttttgtatttttaatagagatagggttttgttatgttggttagattggttatgaatttttggttttaggtgatttgtttattttagttttttaaagtgttgggattataggtatgagttattatgtttagtttataaatttttaaataaaggattagatggtaaatattttaggtttttgtgggttatataattattgttataattatttagttttgatattattatagaaaagtagttatagataatatataaataaatgagaatggttatgttttaattaaaaatggttttatttttatatattgaattttaaattttatataattttaatattataaaatatttttgattttttaattttttaaaagtgtaaaaattgtttttagttttatatttgtattgtttaataaagtagtatatgtgagtatttaattaaattaaaattaaatataatttaaattttgttttttagttatattagtaatatttttaaatgtttaaaagttatatatggttattagttattatattggatagtataagtatgaaatgtttttattattatagaatattttattagataatgtagttttaggttattatatttattttttgggtataaatttttaggtatttttttagtattttaaatgtttaaaagtgaattttattttttttttaaaattaattttttattattagtatggttaattgtattagtttgttttttgttatttaagttataagtttaggagatatttttaattttttttttattaattttaatatttagtgattgagtgttagaattttttttttttaatattattaaaatttaaatttttttttattttttttagtttattttaagtttgtattttttttggtttttgtgtaagttttttatttttttttttttttgtttttagtattatatttttttaatttattttttgaattattattaataatttttttgaaaagtaaatttgattagtattttttttttttataatttttatgtgtttttttatatttattatagggtaaaatataattttattatatgggttttagtaggaattaatgatatatttaaattgggataatttgataaagagaatatttataaaggtgtggatagggtgtaggggtgttattataaagatgtgtgtagaattagtataaaatgtgttttattagtatttttaggttttagggagttaaggaagagagtggttgttagaaattggagatgtggaaattggagatggagagggttgttttttgtttttagattatttttagattatatatttttttttgaaatttatttatttgttttaattttttttttatttttttgatttttattttgttatatagtttttatattttttgttgtggttttaatatattggtaatttttaaatttatattttttttaagtttttttttttttagttttagttttttatatttaattattttaatataaatatatggatattttataggttttttatatttagtatgtttataatagagtttattattttttttttaaaatttgttttgtttataaaatttttagaattagaaaatattattattatttatttagttattaaaattagagatttggtgttgaatatggggggtttttgggttaaatttgttttttagatttaatttttataattatatttatatttaagtttatttatttagattatttttttgttttagttaagtaaaattattagtagttttatatgatttttttgtgtttttgtatgtgttttttttaagaatgtgttttagttgtttttttttggttggtatttttttttttatttatttttgaagattagtttaaggtgtatttattttgtgaaatgtttttttttatttttgtttttatattttaattatatttattttaaaaattataaatattttaaatatagttattttttaaatgtgtatttgttgatttttaagtttgttttttttattgaattttaagtttattgagagtatagattattatttttagttgttaatataatttgaatttttgtttgtttatttgggttttggttttatttgtaaaataggaataaaaaaaaaatttattttgtaaaattattgtgaggattaaagatattgtttgtttagtaagaagttagaataaagtaggtgtatataaattagtgaatgttattattattgataaataagtgggtgattaagtatttgatgaagagagggattagattgataatgtgaatatttatgttgttttaaaggaattgtaagtagtttagttttgttagaaagtagggtaaatattaaatgatgagggataaatttgtaaagattagaaattgattttaattgttttggttatttttttagagagtttgattttttatttgtagatataggtttattgatttaagtggtaagggatatgataagattattttttatataattttggtggtatagtaagtaagttataaggatggaagaatatttaagagtttgagggttaggtgtagtggtttatatttgtaattttagtattttgggaggttgaggtaggaggattgtttgagtttagaagtttgagattaggttgggtaatgtaggaaaatattgtttttataaaaaaattttttaaattagttatttgtaggggtatatgttttggttttagttatttgggaggttgaggtgggaggattgtttgagtttaggaatttgaggttgtagtgagttatgattatgttattgtattttagtttgggtaatagagtaagattttgttttaaaaaaaaaaaaaaagtgtagagaggaatttaattaattatatagttagtttgaggtatttattagtttattaataaaaattttagaagatagtttgaagtaagtttggagtgtagatgagatttgagttgtggagatagttatatttaggtagaagtggtttaggaaaaaaagttttaatgatatgtttataatttgggaataaaggtgggtatagtaattttttgggaggtagtagaaaaataggggtaagtggaattaaggaagttaaattaaaagagtttaagagaagattagttaagaatattaaatataggttaggtagtagtggtttatgtttgtaattttaatgtttgggtagattgaggtaggagtatttgagattaggagtttgagattagtatgggtagtatagtgagattttgtttttaaaaataaagaaattaagaatattaaatatagtagaaaggttatatgagatgaattgaaaaatgattattggatttggtatttgttattttattattgtgttgtaattgtgtgtgaaaaatggtgatgttttgttatgaatagagattaataaaataataaatgatttgaaggatatgtattttttttgtttgtttgttttgagttagggttttattgtgttatttaggttgaaatgtagtggtgtaattttagtttatggtagttttgattttttggatttgttatttttttattttaattttttgagtagttgggattatagttatgtgttattatatttagataatttttgtatttttagtagagataggggatgggggtgggaggtttattatgttggttaggttggtgtggaatttttggttttaagtgatttgtttattttggttttttaaagtgttgggattataggtgttagttattgtttagtttatttttttaatattaaatatattattttttttgaattagatgaaatgtttaatttaatttattttattttattttagtaggatttggagaattaaatttagtagttaaagattagtttataatttttattagtaaatttatgtataaattgttatttgttagatattgtgagggatgttatatgggatattttagttttttttagaattgagttatttatagttaaggttttgtaatagaattaatttgaaaagttaaggtttttaattatttagatttattaaatttttagggtatttagattttatgttttaattaaattataattttattgtggtaattattatttatgtgtttttgagtttttatgaattgttggtttttagttttaaggagatttttttatttaattattttttgttttgagttggttgggagtttggtgtggggtagggaaggttgttgttgttgttgttttggttgtttgtagtttttgatgtgttaggataggtggatgtagagattatttggattgaagggtggttttgtggagttttttggagtttgaaattgtagtggggattttgaggtgagtgggttttttttgatgatggggaaattgttggggtagaaggtgaggttgatgagattttaggttttagtatttttttaaattttttttgatttgagaagtatgaggtttttgagtgatttttttagtagtttaattatagaagttgtgttgttgaaatgggtgggagaattgtgtgttgatgtattaagttgtattgtgtaggtgtaggtaggtttagttttttatatggatttatgtattttaggtttatgattttgtttttagttatttttaaatttattattttttatatgaattttattggaatatttttagtttgtaggtattagattgattagaattttgtaaggtttattaatgattatttgatttgttagttttattatttttatagtatttaattttttttattgtaaatgttatatgtattttttatatgtttaagtatattagtttatttttaaatgtagaaattatttaatatagtatatttagtgtttttgatataatgagaatgtgtaatgtttatatagtataatttatttaaggttgattttgtgattaaatataggaaagatagttatattattaaaagatagtatgtatatggttgtgtgtatagtagagtaggaaatagggaaagattgattgggtaagattttttagttaataattttttatttattaatttttagtattgtggtttttaatatataaattagttaatggtatattagaagtttaaattttagttttgtagtggtgatttttagaaaattttttaaataaggttaatagtattaatttattagagatttatggattaaatatgatgaaattatttggatattgttatatagaagttattagaagatattaatttatattattattgaaattttgttattgttgagtattttaataaattagttatgtatagtggtttatttatatgtagtgataatagtttttaagaatatttttgtttttggaatgattattgtatagggtattttaaatatatttgagaaaaattttaatttttattaaaaaattttatttttagattgggtatgatggtttttttttgtaattttagtattttgggagattgaggttagaggattattttatttttggagattagtttggggaagatagtgtttgtttttaaaattaagaaattagttgggtatagtgggtatggtggtaggtatttgtagattttggtatttaggaggttgaggtggaaggattgtttgagtttaggagtttaaggttatagtgagttgtgattgtattattatgttttagtttggggaagaaaggaagattttgtttttaaaaaataaaatttaaaaatagagaatattttatttttattaaaattgtaaatttttagagtgattgtatttattttaggttaggtgtggtggtttatgtttgtaattttagtattttgggaggttgaggtgggtggattataaggttaggttggtttttagttttttagtatggtgaaattttgtttgtattaaagtaatataaaaattagttgggtatggtggtgtgtggttgtagttttagttatttgagaggttgtggttgaattgtttaaatttggtagatggaggttgtagttaagttgagattgtgttgttgtgttttagtttgggtaatagagattttgttataaaaaaataaaaaagagtgattgtatttattttagttttttaagaaaaagataggtgtaaaaaaatattgtggtgattattaatttatttgttagtgtttttttatttgaagataattttttttttgggtaattttgatatataaaatgttaaaaaaaaaaaaaaaaaaaaaaaaaaaaaggatagtttgaattataattttattttaagatggtagattgttatttaatttaagtttgtgattaatttagaataattatatttaaatttattaattatttttaaattttaatagttatttattttgtgtattatttaatttatgtatgggttttatttatttttattagttaatatttttgttgataaattaatttatattaatttgttatagaatagatgaaaggtatatatgggggaaaaattaagtagaaatttagagttattttatgttagtttagttattgaatataatagatatagaagtatatataaagaattgtagttagaataataggattttagaataaaaagtagaaaataaaatattggtttttattttataatatgtataattatataatttattaaaattaatttaatataatatataaaatattaatagtagttatttttagatttgataagtattttaaatatagaaatgttaaaatggtaaaattatattatgtaatttttaatttaatgaatttagtttattagtttaggttgaatatttattttttgaagtatttttttaggtatgtaaaagataggattaataggtttaatttgttttttttttaaaagtgataatttagtaattttaaataaggtatgaaaaggatttatttatttaaaaaagaatttatatatagattataaaatgaaaatttttttaattttaaattatgaatatttgatttttattatatattaattttgttagtaataagtgataagaaatttttgtaagattgttttatattttttatatattttataataaatagaaaaaaaaattgtttttaaagtaatatttggaatgttattttggaaatttatggaattatgaagtaatgtaaatgttgaaataatttatagaaatatgttagaaatattatttgttatattttttggtttgtttgtaaatttttttgtttttttattttgatatgttaaaatgaaattatgtagtttttttttattaatttaatgaagttttttaattatttttagggaagttaggatttattatgagtagtatatatttggtaattaggagggaaaaaagttgttataattttatttttttttatttttttaattttgagaataatttaaaagtgggttaagttttatttttaggtaatttgatgtttaaagtgttaaattatgtggaaggatgaaatttagggatatattgatatgtagggtatgaaatatttgtttagaatgaaagataattaattaatgggtaagaagagattaaattttaatttataggtaattatgttaaatattttagtatttattgataagtatgtatttgttttgtttttatttgtaatgaatgtttaatttagttttttaattaagaagttagtagtataattatgaaatttatgggtatagttttgtttttttataagtattgtttaggggggtatatatttgtttaaaattaattaaatttttgttttttaaaatatggtgatagaagtttataaagaaaattttatttaaggttgattttattttaatgagatttttgagtaatttatagatttattagaagttgttttagattgtgtgtaagtgtaggttttggtgttttttatggttatttatttttttgttgatagttttttaggttttttattttattttattgtagatagttattgtgggtgtttttttatttgttgttatttagaaatattaaggtttaaaaataaaaatataggttgagtatagtggtttatgtttgtaattttagtattttgggaggttgaggtgggtagattatttgaggttaggagtttaagattagtttgatgaatatggtgatattttatttttattaaaaatataaaattggatgggtgtggtggtgtatgattgtaattttagttattgtattattatgttttatttagagggtaggggtatagtaagttataatttttgagttaaatttatagtgtaggaatagtttttatatttataaattatttaaatatagttttgggttaggtatggtggtttatgtttataattttagtattttgggaggttgatgtaggtagattatgaggttaggagtttgagattagtttggttaatatggtgaaattttgtttttaataaaaatataaaaattagttgtgtgtttgtagttttagttatttgggaggttgaggtagaattgtttgaatttgggaggtggaggttgtagtgaattaagatggtgttattgtattttagtttgggtaatagagtaagattttatttgatataggaaatataagtatatttatttataataattgtaattggaatatagttatatttatttattttttattatttatggttgtatttgttttataggataattatatagttgtaaatgagtatttattatttgttttttatagatttgataagagagatttattatgtggaggaaaatttaataattttttttttaaattaaattatttgggtattttttaaataagaagattgtaaataaaaattttgtagtttaatttttaaaaaatttaatttgttaaaattaattgtttttaaatatggagatttttgtataagattgtttggaaatggatattaggattaatgagtattttaatttatgggggtttattttgttaaggggagttttttagtaggatatattattgaaaatttataatagggaaaggtaataaataagtttatggttaatttataatatagaaataggtaagataaagtagtagtatttatttaaggttttaaagttagtagaatatggtttattaaataatattttttttggttttttattgagtttgtttgagggtaattgttgtttataaagttattagttaagtaaattagaatttatttgatgtaattgatttgtaattgttagaaattttgtgtaataatagatttaaaattatagatataaagtttatgtgtataataattttttgatattaaaagtgataaaatttaaattattaaaatattattttatattttaagtttttttttttgatttgatatttaaaattttaaatatgtattaatattatatatttgaaaaaatttaagtatattattattagtatgtaattttgtattgaaatattattgttaaaatttttttatggttagtattttata

SEQ ID NO: 385 - DNA, 2455 bp, Artificial Sequence
  chemically treated genomic DNA (Homo sapiens)
ggagtgtaagaatatagaattaaaatagagtttgaaatttaaagaaagggagagatttgggggaggagtggggtggagtgatgtgatgtgttgttggaaattagtagttggtggtttttttttgtgtttttttttttgtgggtttttttttgtttgtgggagggtttttttttttttttttgatagaaaggttatttttggtgtttgtttttttgaattgtaatattttgtaagggtatgattttatgtttttgtgtgggtgtgaatttttttatggtgatttttaaaatttgtatataggatttttttttattgaggggaggggattaaaataattttattttttagggtttttttttgttttaattggtttgtgtttaagagaagttttaggtaaatggggttagtttgaagattaaataggtttggtagttttttttggtttttttttttttttttatagttttatagttatagttgttttgatattaatattgattttggttggttggtatgattatttatagggtattgtgttttaatttattaggtgataggtaatgttgtttttttttggaattatttagtagagttagggttgtatttttaaattttgtaatagaggtttttttttattttatttttttgtttttgtattttttttattttagtagtttttttttttttttttgggtttttttttttatttttttttttttttgggtttggtaaattagtttttaatttttttatattttagattggaaggtgggtttttttttgatattttttagagttgttattaattttttttaagtttttatagttttattgtttaatagatttgttaggggtaattattaatttagtttttaattttgtttttttattttttttgttggaggggattttttaattattggttagtatagttaggttattttatttttattattttttttaattttttgggttggggggttggggaggaatttttttattttagggtattaggaataaagttggggaggatggtgtatttaaagggattatatatatatatatatatatttttttttttttttttttataattttatttttgtaatatatatatatatatatatatatatatatatatatatatatatagatgtataaataagttttatggagtagtgattttattatgtttattgttttgagtttaatttttggtttaaaataggtattaaatagttgttgaatgtatgaatgatagatatttttttgtttttaggggtgtgtagaagtgtgaaggggtatgggtatgttttagtaggggtgtgagtgttttgattagaattatttttttttgttagaatttgatgtaatttgaatgtttttatttttgtttgaagggtttaaataataaattaggttttgttgtgttattatgggggtggttatattttgtatttaggaaataggtatggtagggttgagatagaagttttgtttgtttttgtttatttatttgaaatattgtttatttaggttttattttgtttgttaggtattgttttaagttttgtataaatattaatttagagggtataaatattaatttaagagttgttgtaggaaaaaaaataagtgtttttggttttttaagtttggttttttttttaaaatttttgtaatggttttaaattttttttagggattgggattatggattttggtttgatttttttgtgggttttttattgtgttaattaaattttagaaatagtgagtgttagaggtttggttgttaagtaatggtagagggtgggaagtttgaatgttttggatttgttttgaaggtaaataggttaattagtgtttagattttttagttatggtagtttgttttttttttttgttttgttggatttttaggttggatttgggtttttttaattaatagtggttaggagggtggggtgtgtgtgtgtgtattttgtttatgtgttggtgtgttttttttgtaggtttgtggtggttggttagtggggtgtttttttatttgtagtgatttaggttattgaaaaggtgggaaaatgttgtgatggtggtagttgggggaggaggaagataagtgtgtgaggttggggttttggtgtgtggttggtagaggtagagatataagatgtgtatgatttgttttatagggtttttagattttttttttttaaagggtaatttttgtgtgataggaatgagggtggggtgtgtggagttttttataatttgtattttagttaaatatttgagaatttattttttgtgtttatagttttttatgttttttagttttgttttgtagttttgtagtagaagtatttagtgttttgtattttgtgtgttattttattttggttttttttgtgaattgttgtttttgaattgtttttattttttgtatttgtaga

SEQ ID NO: 386 - DNA, 2455 bp, Artificial Sequence
  chemically treated genomic DNA (Homo sapiens)
tttgtggatgtaaaaagtgagggtggtttggaagtaatgatttatagaggaggttggggtagggtggtgtgtagaatgtaaagtattaagtatttttgttatagggttgtggggtagggttgaggggtgtggagagttgtggatataggaggtgaatttttgggtatttaattaaagtatagattgtgggaaattttatgtgttttatttttatttttgttatgtggaggttattttttggaaggaaggggtttgagggttttgtggggtgagttgtgtatgttttatgtttttgtttttgttaattatgtgttaggattttagttttatgtgtttatttttttttttttttagttgttgttattgtagtgtttttttgtttttttagtaatttgagttgttataggtgggagaatgttttgttgattgattgttatgagtttgtaaaaggagtgtgttggtgtgtgagtgaggtgtgtgtgtatgtgttttgtttttttagttgttgttgattggagaggtttggatttagtttagagatttgatagggtgaggaggagaagtggattgttgtagttgaagagtttggatgttgattggtttatttgtttttggggtgggtttagaatgtttaaattttttgttttttgttgttgtttagtagttgggtttttagtatttattgtttttgggatttgattggtgtagtgggaagtttgtgagaaggttggattagggtttgtagttttagtttttggaaggggtttgggattgttgtgggggttttgagggggaggttaaatttaaagagttagaggtgtttatttttttttttgtaataatttttaagttaatatttgtattttttgagttaatatttatatagagtttagaatagtgtttggtaaataaagtaagatttaaatgagtggtgttttaaataaataagtggaaataagtaggatttttgttttagttttattgtgtttgttttttgggtatagggtatgattatttttataatggtatgatagggtttaatttattatttaaattttttaagtagaggtggaagtatttgaattatattaaattttggtagagagaagtagttttgattagaatatttatatttttattgggatatgtttatatttttttgtatttttatatatttttgaagatagagaggtatttattatttatgtatttggtaattatttagtgtttattttgggttaggggttggatttaaagtggtgaatataatgaagttattgttttataaagtttatttgtgtgtttgtgtgtgtgtgtgtgtgtgtgtgtgtgtgtgtgtgtgtgtgtgttgtgggggtggggttatgagggagaaagaaaaaaaatatatatatatatatatataatttttttaaatgtattattttttttagttttgtttttagtattttgagatggggagatttttttttagttttttaatttaagaagttaggaaagatggtgggggtgagatgatttagttgtgttaattagtaattggaaaattttttttagtaagaaaggtgggggaatagagttaagggttgggttaatggttatttttggtaaatttgttgagtaatggagttatagaaatttggaggaggttggtgatagttttggggagtgttagggagggatttattttttaatttggggtgtgaagagattagggattagtttattaagtttaggaaggggagggagtggaaagagaagtttagagagggaaagaggagttattgagataggagaaatgtagggatagggaggtgagatggagggaaatttttgttgtaggatttgggggtatagttttggttttgttggatggttttaggagagggtagtgttgtttgttatttggtaaattaaggtatgatattttgtgggtagttatgttagttagttaaagttaatattgatattaaggtagttgtagttataaagttgtaggagagaaaagagaggttgggagaggttgttaaatttgtttgatttttaagttggttttatttatttaaggttttttttggatatagattagttggaataggagaggattttgagaagtagagttgttttgattttttttttttaatgggaaggggttttgtgtgtagattttgagggttattatgagggaatttatatttatatagaggtatggaattatatttttataggatgttatagtttaagggaatgaatattaaagatagtttttttgttgggaggagagaaaaaggtttttttataagtaggagaaaatttatagaagaggaagtataagaggaaattattaattgttggtttttagtagtatattatgttattttattttattttttttttaagtttttttttttttttaagttttaagttttgttttagttttgtgtttttgtatttt

SEQ ID NO: 387 - DNA, 28 bp, Artificial Sequence
  Detection primer for MDR1
taagtatgttgaagaaagattattgtag

SEQ ID NO: 388 - DNA, 28 bp, Artificial Sequence
  Detection primer for MDR1
taaaaactatcccataataactcccaac

SEQ ID NO: 389 - DNA, 20 bp, Artificial Sequence
  Detection primer for APOC2
atgagtagaagaggtgatat

SEQ ID NO: 390 - DNA, 20 bp, Artificial Sequence
  Detection primer for APOC2
ccctaaatccctttcttacc

SEQ ID NO: 391 - DNA, 23 bp, Artificial Sequence
  Detection primer for CACNA1G
gggatttaagagaaattgaggta

SEQ ID NO: 392 - DNA, 20 bp, Artificial Sequence
  Detection primer for CACNA1G
aaaccccaaacatcctttat

SEQ ID NO: 393 - DNA, 20 bp, Artificial Sequence
  Detection primer for EGR4
agggggattgagtgttaagt

SEQ ID NO: 394 - DNA, 20 bp, Artificial Sequence
  Detection primer for EGR4
cccaaacataaacacaaaat

SEQ ID NO: 395 - DNA, 20 bp, Artificial Sequence
  Detection primer for AR
gtagtagtagtagtaagaga

SEQ ID NO: 396 - DNA, 20 bp, Artificial Sequence
  Detection primer for AR
accccctaaataattatcct

SEQ ID NO: 397 - DNA, 23 bp, Artificial Sequence
  Detection primer for RB1
tttaagtttgtttttgttttggt

SEQ ID NO: 398 - DNA, 22 bp, Artificial Sequence
  Detection primer for RB1
tcctactctaaatcctcctcaa

SEQ ID NO: 399 - DNA, 22 bp, Artificial Sequence
  Detection primer for GPIb beta
ggtgataggagaataatgttgg

SEQ ID NO: 400 - DNA, 20 bp, Artificial Sequence
  Detection primer for GPIb beta
tctcccaactacaaccaaac

SEQ ID NO: 401 - DNA, 24 bp, Artificial Sequence
  Detection primer for MYOD1
attaggggtatagaggagtattga

SEQ ID NO: 402 - DNA, 22 bp, Artificial Sequence
  Detection primer for MYOD1
cttacaaacccacaataaacaa

SEQ ID NO: 403 - DNA, 20 bp, Artificial Sequence
  Detection primer for WT1
aaagggaaattaagtgttgt

SEQ ID NO: 404 - DNA, 19 bp, Artificial Sequence
  Detection primer for WT1
taactaccctcaacttccc

SEQ ID NO: 405 - DNA, 22 bp, Artificial Sequence
  Detection primer for HLA-F
ttgttgtttttaggggttttgg

SEQ ID NO: 406 - DNA, 22 bp, Artificial Sequence
  Detection primer for HLA-F
tccttcccattctccaaatatc

SEQ ID NO: 407 - DNA, 24 bp, Artificial Sequence
  Detection primer for ELK1
aagtgttttagtttttaatgggta

SEQ ID NO: 408 - DNA, 20 bp, Artificial Sequence
  Detection primer for ELK1
caaacccaaaactcacctat

SEQ ID NO: 409 - DNA, 22 bp, Artificial Sequence
  Detection primer for APC
tcaactaccatcaacttcctta

SEQ ID NO: 410 - DNA, 25 bp, Artificial Sequence
  Detection primer for APC
aatttatttttagtgttgtagtggg

SEQ ID NO: 411 - DNA, 22 bp, Artificial Sequence
  Detection primer for BCL2
gtattttatgttaagggggaaa

SEQ ID NO: 412 - DNA, 18 bp, Artificial Sequence
  Detection primer for BCL2
aaaaaccacaatcctccc

SEQ ID NO: 413 - DNA, 20 bp, Artificial Sequence
  Detection primer for CALCA
gttttggaagtatgagggtg

SEQ ID NO: 414 - DNA, 21 bp, Artificial Sequence
  Detection primer for CALCA
ccaaattctaaaccaatttcc

SEQ ID NO: 415 - DNA, 19 bp, Artificial Sequence
  Detection primer for CDH1
gaggttggggttagaggat

SEQ ID NO: 416 - DNA, 25 bp, Artificial Sequence
  Detection primer for CDH1
caaactcacaaatactttacaattc

SEQ ID NO: 417 - DNA, 21 bp, Artificial Sequence
  Detection primer for CDKN1A
ggattagtgggaatagaggtg

SEQ ID NO: 418 - DNA, 21 bp, Artificial Sequence
  Detection primer for CDKN1A
aaacccaaactcctaactacc

SEQ ID NO: 419 - DNA, 19 bp, Artificial Sequence
  Detection primer for CDKN1B (p27 Kip1)
gtggggaggtagttgaaga

SEQ ID NO: 420 - DNA, 20 bp, Artificial Sequence
  Detection primer for CDKN1B (p27 Kip1)
atacacccctaacccaaaat

SEQ ID NO: 421 - DNA, 20 bp, Artificial Sequence
  Detection primer for CDKN2a
ttgaaaattaagggttgagg

SEQ ID NO: 422 - DNA, 20 bp, Artificial Sequence
  Detection primer for CDKN2a
caccctctaataaccaacca

SEQ ID NO: 423 - DNA, 20 bp, Artificial Sequence
  Detection primer for CDKN2a
ggggttggttggttattaga

SEQ ID NO: 424 - DNA, 20 bp, Artificial Sequence
  Detection primer for CDKN2a
aaccctctacccacctaaat

SEQ ID NO: 425 - DNA, 22 bp, Artificial Sequence
  Detection primer for CDKN2B
ggttggttgaaggaatagaaat

SEQ ID NO: 426 - DNA, 22 bp, Artificial Sequence
  Detection primer for CDKN2B
cccactaaacatacccttattc

SEQ ID NO: 427 - DNA, 21 bp, Artificial Sequence
  Detection primer for CD44
gaaaggagaggttaaaggttg

SEQ ID NO: 428 - DNA, 21 bp, Artificial Sequence
  Detection primer for CD44
aactcacttaactccaatccc

SEQ ID NO: 429 - DNA, 22 bp, Artificial Sequence
  Detection primer for CSPG2
ggataggagttgggattaagat

SEQ ID NO: 430 - DNA, 22 bp, Artificial Sequence
  Detection primer for CSPG2
aaatctttttcaacaccaaaat

SEQ ID NO: 431 - DNA, 22 bp, Artificial Sequence
  Detection primer for DAPK1
aaccctttcttcaaattacaaa

SEQ ID NO: 432 - DNA, 21 bp, Artificial Sequence
  Detection primer for DAPK1
tgattgggttttagggaaata

SEQ ID NO: 433 - DNA, 22 bp, Artificial Sequence
  Detection primer for EGFR
gggtttggttgtaatatggatt

SEQ ID NO: 434 - DNA, 19 bp, Artificial Sequence
  Detection primer for EGFR
cccaacactacccctctaa

SEQ ID NO: 435 - DNA, 21 bp, Artificial Sequence
  Detection primer for EYA4
ggaagaggtgattaaatggat

SEQ ID NO: 436 - DNA, 19 bp, Artificial Sequence
  Detection primer for EYA4
cccaaaaatcaaacaacaa

SEQ ID NO: 437 - DNA, 19 bp, Artificial Sequence
  Detection primer for GSTP1
atttgggaaagagggaaag

SEQ ID NO: 438 - DNA, 21 bp, Artificial Sequence
  Detection primer for GSTP1
taaaaactctaaaccccatcc

SEQ ID NO: 439 - DNA, 19 bp, Artificial Sequence
  Detection primer for GTBP/MSH6
ccctacccaccaatatacc

SEQ ID NO: 440 - DNA, 21 bp, Artificial Sequence
  Detection primer for GTBP/MSH6
agatttggggaagaagttgta

SEQ ID NO: 441 - DNA, 20 bp, Artificial Sequence
  Detection primer for HIC-1
tgggttggagaagaagttta

SEQ ID NO: 442 - DNA, 21 bp, Artificial Sequence
  Detection primer for HIC-1
tcatatttccaaaaacacacc

SEQ ID NO: 443 - DNA, 23 bp, Artificial Sequence
  Detection primer for HRAS
cttattcccatctaaaccctatt

SEQ ID NO: 444 - DNA, 22 bp, Artificial Sequence
  Detection primer for HRAS
gtggttttgtgaagttttaggt

SEQ ID NO: 445 - DNA, 20 bp, Artificial Sequence
  Detection primer for IGF2
cccttccccttaactaaact

SEQ ID NO: 446 - DNA, 19 bp, Artificial Sequence
  Detection primer for IGF2
aatttgggttaggtttgga

SEQ ID NO: 447 - DNA, 22 bp, Artificial Sequence
  Detection primer for LKB1
taaaagaaggatttttgattgg

SEQ ID NO: 448 - DNA, 21 bp, Artificial Sequence
  Detection primer for LKB1
catcttatttacctccctccc

SEQ ID NO: 449 - DNA, 22 bp, Artificial Sequence
  Detection primer for MGMT
aaggttttagggaagagtgttt

SEQ ID NO: 450 - DNA, 23 bp, Artificial Sequence
  Detection primer for MGMT
accttttcctatcacaaaaataa

SEQ ID NO: 451 - DNA, 20 bp, Artificial Sequence
  Detection primer for MLH1
taaggggagaggaggagttt

SEQ ID NO: 452 - DNA, 22 bp, Artificial Sequence
  Detection primer for MLH1
accaattctcaatcatctcttt

SEQ ID NO: 453 - DNA, 22 bp, Artificial Sequence
  Detection primer for MNCA9
gggaagtaggttagggttagtt

SEQ ID NO: 454 - DNA, 22 bp, Artificial Sequence
  Detection primer for MNCA9
aaatcctcctctccaaataaat

SEQ ID NO: 455 - DNA, 18 bp, Artificial Sequence
  Detection primer for MSH3
tgtttgggattgggtagg

SEQ ID NO: 456 - DNA, 23 bp, Artificial Sequence
  Detection primer for MSH3
cataacctttacctatctcctca

SEQ ID NO: 457 - DNA, 22 bp, Artificial Sequence
  Detection primer for MYC
agagggagtaaaagaaaatggt

SEQ ID NO: 458 - DNA, 22 bp, Artificial Sequence
  Detection primer for MYC
ccaaataaacaaaataacctcc

SEQ ID NO: 459 - DNA, 22 bp, Artificial Sequence
  Detection primer for N33
ttttagattgaggttttagggt

SEQ ID NO: 460 - DNA, 22 bp, Artificial Sequence
  Detection primer for N33
atccattctacctcctttttct

SEQ ID NO: 461 - DNA, 18 bp, Artificial Sequence
  Detection primer for PAX6
ggaggggagagggttatg

SEQ ID NO: 462 - DNA, 22 bp, Artificial Sequence
  Detection primer for PAX6
tactatacacaccccaaaacaa

SEQ ID NO: 463 - DNA, 19 bp, Artificial Sequence
  Detection primer for PGR
ttttgggaatgggttgtat

SEQ ID NO: 464 - DNA, 21 bp, Artificial Sequence
  Detection primer for PGR
ctacccttaacctccatccta

SEQ ID NO: 465 - DNA, 26 bp, Artificial Sequence
  Detection primer for PTEN
ttttaggtagttatattgggtatgtt

SEQ ID NO: 466 - DNA, 21 bp, Artificial Sequence
  Detection primer for PTEN
tcaactctcaaacttccatca

SEQ ID NO: 467 - DNA, 22 bp, Artificial Sequence
  Detection primer for RARB
ttgttgggagtttttaagtttt

SEQ ID NO: 468 - DNA, 22 bp, Artificial Sequence
  Detection primer for RARB
caaattctccttccaaataaat

SEQ ID NO: 469 - DNA, 20 bp, Artificial Sequence
  Detection primer for SFN
gaagagaggagagggaggta

SEQ ID NO: 470 - DNA, 19 bp, Artificial Sequence
  Detection primer for SFN
ctatccaacaaacccaaca

SEQ ID NO: 471 - DNA, 22 bp, Artificial Sequence
  Detection primer for S100A2
gtttttaagttggagaagagga

SEQ ID NO: 472 - DNA, 22 bp, Artificial Sequence
  Detection primer for S100A2
acctataaatcacaacccactc

SEQ ID NO: 473 - DNA, 22 bp, Artificial Sequence
  Detection primer for TGFBR2
gtaatttgaagaaagttgaggg

SEQ ID NO: 474 - DNA, 22 bp, Artificial Sequence
  Detection primer for TGFBR2
ccaacaactaaacaaaacctct

SEQ ID NO: 475 - DNA, 22 bp, Artificial Sequence
  Detection primer for TIMP3
tgagaaaattgttgtttgaagt

SEQ ID NO: 476 - DNA, 22 bp, Artificial Sequence
  Detection primer for TIMP3
caaaataccctaaaaaccactc

SEQ ID NO: 477 - DNA, 20 bp, Artificial Sequence
  Detection primer for TP53
ggagttgtattgttgggaga

SEQ ID NO: 478 - DNA, 21 bp, Artificial Sequence
  Detection primer for TP53
taaaaccccaattttcactaa

SEQ ID NO: 479 - DNA, 24 bp, Artificial Sequence
  Detection primer for TP73
agtaaatagtgggtgagttatgaa

SEQ ID NO: 480 - DNA, 25 bp, Artificial Sequence
  Detection primer for TP73
gaaaaacctctaaaaactactctcc

SEQ ID NO: 481 - DNA, 26 bp, Artificial Sequence
  Detection primer for VHL
tgtaaaatgaataaagttaatgagtg

SEQ ID NO: 482 - DNA, 23 bp, Artificial Sequence
  Detection primer for VHL
tcctaaattcaaataatcctcct

SEQ ID NO: 483 - DNA, 22 bp, Artificial Sequence
  Detection primer for CDKN1C
ggggaggtagatatttggataa

SEQ ID NO: 484 - DNA, 23 bp, Artificial Sequence
  Detection primer for CDKN1C
aactacaccatttatattcccac

SEQ ID NO: 485 - DNA, 22 bp, Artificial Sequence
  Detection primer for CAV1
gttagtatgtttgggggtaaat

SEQ ID NO: 486 - DNA, 22 bp, Artificial Sequence
  Detection primer for CAV1
ataaataacaccttccacccta

SEQ ID NO: 487 - DNA, 22 bp, Artificial Sequence
  Detection primer for CDH13
tttgtattaggttggaagtggt

SEQ ID NO: 488 - DNA, 22 bp, Artificial Sequence
  Detection primer for CDH13
cccaaataaatcaacaacaaca

SEQ ID NO: 489 - DNA, 22 bp, Artificial Sequence
  Detection primer for DRG1
ggttttgggtttagtggtaaat

SEQ ID NO: 490 - DNA, 22 bp, Artificial Sequence
  Detection primer for DRG1
aactttcataactcaccctttc

SEQ ID NO: 491 - DNA, 22 bp, Artificial Sequence
  Detection primer for PTGS2
gatttttggagaggaagttaag

SEQ ID NO: 492 - DNA, 22 bp, Artificial Sequence
  Detection primer for PTGS2
aaaactaaaaaccaaacccata

SEQ ID NO: 493 - DNA, 20 bp, Artificial Sequence
  Detection primer for THBS1
tggggttagtttaggatagg

SEQ ID NO: 494 - DNA, 25 bp, Artificial Sequence
  Detection primer for THBS1
cttaaaaacactaaaacttctcaaa

SEQ ID NO: 495 - DNA, 21 bp, Artificial Sequence
  Detection primer for TPEF (=TMEFF2; =HPP1)
ttgtttgggttaataaatgga

SEQ ID NO: 496 - DNA, 20 bp, Artificial Sequence
  Detection primer for TPEF (=TMEFF2; =HPP1)
cttctctcttctcccctctc

SEQ ID NO: 497 - DNA, 18 bp, Artificial Sequence
  Detection primer for DNMT1
tccccatcacacctaaaa

SEQ ID NO: 498 - DNA, 18 bp, Artificial Sequence
  Detection primer for DNMT1
gggaggaggggatgtatt

SEQ ID NO: 499 - DNA, 22 bp, Artificial Sequence
  Detection primer for CEA
tatgggaggaggttagtaagtg

SEQ ID NO: 500 - DNA, 22 bp, Artificial Sequence
  Detection primer for CEA
ccccaaatcctacatataaaaa

SEQ ID NO: 501 - DNA, 21 bp, Artificial Sequence
  Detection primer for MB
gtttttggtaaaggggtagaa

SEQ ID NO: 502 - DNA, 22 bp, Artificial Sequence
  Detection primer for MB
cctaaaatatcaacctccacct

SEQ ID NO: 503 - DNA, 23 bp, Artificial Sequence
  Detection primer for PCNA
tttttaggttgtaaggaggtttt

SEQ ID NO: 504 - DNA, 22 bp, Artificial Sequence
  Detection primer for PCNA
taaatacctccaacacctttct

SEQ ID NO: 505 - DNA, 25 bp, Artificial Sequence
  Detection primer for CDC2
attagaagtgaaagtaatggaattt

SEQ ID NO: 506 - DNA, 19 bp, Artificial Sequence
  Detection primer for CDC2
tcaatttccaaaaaccaac

SEQ ID NO: 507 - DNA, 22 bp, Artificial Sequence
  Detection primer for ESR1
agggggaattaaatagaaagag

SEQ ID NO: 508 - DNA, 22 bp, Artificial Sequence
  Detection primer for ESR1
caataaaaccatcccaaatact

SEQ ID NO: 509 - DNA, 22 bp, Artificial Sequence
  Detection primer for CASP8
agtggatttggagtttagatgt

SEQ ID NO: 510 - DNA, 22 bp, Artificial Sequence
  Detection primer for CASP8
aacaaaataaaaacttctccca

SEQ ID NO: 511 - DNA, 24 bp, Artificial Sequence
  Detection primer for RASSF1
acctctctacaaattacaaattca

SEQ ID NO: 512 - DNA, 20 bp, Artificial Sequence
  Detection primer for RASSF1
agtttgggttagtttgggtt

SEQ ID NO: 513 - DNA, 21 bp, Artificial Sequence
  Detection primer for MSH4
aggatgttgaggtttgagatt

SEQ ID NO: 514 - DNA, 21 bp, Artificial Sequence
  Detection primer for MSH4
cactataataaccaccaccca

SEQ ID NO: 515 - DNA, 22 bp, Artificial Sequence
  Detection primer for MSH5
tattaggaataaagttggggag

SEQ ID NO: 516 - DNA, 22 bp, Artificial Sequence
  Detection primer for MSH5
aacccttcaaacaaaaataaaa

SEQ ID NO: 517 - DNA, 18 bp, Artificial Sequence
  Detection oligonucleotide for MDR1
ttggtggtcgttttaagg

SEQ ID NO: 518 - DNA, 18 bp, Artificial Sequence
  Detection oligonucleotide for MDR1
ttggtggttgttttaagg

SEQ ID NO: 519 - DNA, 18 bp, Artificial Sequence
  Detection oligonucleotide for MDR1
ttgaaagacgtgtttata

SEQ ID NO: 520 - DNA, 18 bp, Artificial Sequence
  Detection oligonucleotide for MDR1
ttgaaagatgtgtttata

SEQ ID NO: 521 - DNA, 18 bp, Artificial Sequence
  Detection oligonucleotide for MDR1
aggtgtaacggaagttag

SEQ ID NO: 522 - DNA, 18 bp, Artificial Sequence
  Detection oligonucleotide for MDR1
aggtgtaatggaagttag

SEQ ID NO: 523 - DNA, 18 bp, Artificial Sequence
  Detection oligonucleotide for MDR1
tagtttttcgaggaatta

SEQ ID NO: 524 - DNA, 18 bp, Artificial Sequence
  Detection oligonucleotide for MDR1
tagttttttgaggaatta

SEQ ID NO: 525 - DNA, 18 bp, Artificial Sequence
  Detection oligonucleotide for APOC2
gagagtttcgtttttgtt

SEQ ID NO: 526 - DNA, 18 bp, Artificial Sequence
  Detection oligonucleotide for APOC2
gagagttttgtttttgtt

SEQ ID NO: 527 - DNA, 18 bp, Artificial Sequence
  Detection oligonucleotide for APOC2
ttgggggacgttattgtt

SEQ ID NO: 528 - DNA, 18 bp, Artificial Sequence
  Detection oligonucleotide for APOC2
ttgggggatgttattgtt

SEQ ID NO: 529 - DNA, 18 bp, Artificial Sequence
  Detection oligonucleotide for APOC2
tgtgttcgttcggagttg

SEQ ID NO: 530 - DNA, 18 bp, Artificial Sequence
  Detection oligonucleotide for APOC2
tgtgtttgtttggagttg

SEQ ID NO: 531 - DNA, 18 bp, Artificial Sequence
  Detection oligonucleotide for APOC2
tgggtttgcggagaatgg

SEQ ID NO: 532 - DNA, 18 bp, Artificial Sequence
  Detection oligonucleotide for APOC2
tgggtttgtggagaatgg

SEQ ID NO: 533 - DNA, 18 bp, Artificial Sequence
  Detection oligonucleotide for CACNA1G
tttaggagcgttaatgtg

SEQ ID NO: 534 - DNA, 18 bp, Artificial Sequence
  Detection oligonucleotide for CACNA1G
tttaggagtgttaatgtg

SEQ ID NO: 535 - DNA, 18 bp, Artificial Sequence
  Detection oligonucleotide for CACNA1G
tagggttacgaggttagg

SEQ ID NO: 536 - DNA, 18 bp, Artificial Sequence
  Detection oligonucleotide for CACNA1G
tagggttatgaggttagg

SEQ ID NO: 537 - DNA, 18 bp, Artificial Sequence
  Detection oligonucleotide for CACNA1G
ggaggttacgtttagatt

SEQ ID NO: 538 - DNA, 18 bp, Artificial Sequence
  Detection oligonucleotide for CACNA1G
ggaggttatgtttagatt

SEQ ID NO: 539 - DNA, 18 bp, Artificial Sequence
  Detection oligonucleotide for CACNA1G
ttaggggtcgtggataaa

SEQ ID NO: 540 - DNA, 18 bp, Artificial Sequence
  Detection oligonucleotide for CACNA1G
ttaggggttgtggataaa

SEQ ID NO: 541 - DNA, 18 bp, Artificial Sequence
  Detection oligonucleotide for EGR4
ggtgggaagcgtatttat

SEQ ID NO: 542 - DNA, 18 bp, Artificial Sequence
  Detection oligonucleotide for EGR4
ggtgggaagtgtatttat

SEQ ID NO: 543 - DNA, 18 bp, Artificial Sequence
  Detection oligonucleotide for EGR4
ttatagttcgagtttttt

SEQ ID NO: 544 - DNA, 18 bp, Artificial Sequence
  Detection oligonucleotide for EGR4
ttatagtttgagtttttt

SEQ ID NO: 545 - DNA, 18 bp, Artificial Sequence
  Detection oligonucleotide for AR
tgttatttcgagagaggt

SEQ ID NO: 546 - DNA, 18 bp, Artificial Sequence
  Detection oligonucleotide for AR
tgttattttgagagaggt

SEQ ID NO: 547 - DNA, 18 bp, Artificial Sequence
  Detection oligonucleotide for AR
attttgagcgaggttagt

SEQ ID NO: 548 - DNA, 18 bp, Artificial Sequence
  Detection oligonucleotide for AR
attttgagtgaggttagt

SEQ ID NO: 549 - DNA, 18 bp, Artificial Sequence
  Detection oligonucleotide for AR
gtagtattcgaaggtagt

SEQ ID NO: 550 - DNA, 18 bp, Artificial Sequence
  Detection oligonucleotide for AR
gtagtatttgaaggtagt

SEQ ID NO: 551 - DNA, 18 bp, Artificial Sequence
  Detection oligonucleotide for RB1
ttagatttcgggataggg

SEQ ID NO: 552 - DNA, 18 bp, Artificial Sequence
  Detection oligonucleotide for RB1
ttagattttgggataggg

SEQ ID NO: 553 - DNA, 18 bp, Artificial Sequence
  Detection oligonucleotide for RB1
tatagtttcgttaagtgt

SEQ ID NO: 554 - DNA, 18 bp, Artificial Sequence
  Detection oligonucleotide for RB1
tatagttttgttaagtgt

SEQ ID NO: 555 - DNA, 18 bp, Artificial Sequence
  Detection oligonucleotide for RB1
gtgtatttcggtttggag

SEQ ID NO: 556 - DNA, 18 bp, Artificial Sequence
  Detection oligonucleotide for RB1
gtgtattttggtttggag

SEQ ID NO: 557 - DNA, 18 bp, Artificial Sequence
  Detection oligonucleotide for RB1
tggatttacgttaggttt

SEQ ID NO: 558 - DNA, 18 bp, Artificial Sequence
  Detection oligonucleotide for RB1
tggatttatgttaggttt

SEQ ID NO: 559 - DNA, 18 bp, Artificial Sequence
  Detection oligonucleotide for GPIb beta
tgttatttgtcgttgtag

SEQ ID NO: 560 - DNA, 18 bp, Artificial Sequence
  Detection oligonucleotide for GPIb beta
tgttatttgttgttgtag

SEQ ID NO: 561 - DNA, 18 bp, Artificial Sequence
  Detection oligonucleotide for GPIb beta
gtgggagcggaagtttga

SEQ ID NO: 562 - DNA, 18 bp, Artificial Sequence
  Detection oligonucleotide for GPIb beta
gtgggagtggaagtttga

SEQ ID NO: 563 - DNA, 18 bp, Artificial Sequence
  Detection oligonucleotide for GPIb beta
tagagtaagtcgggttgt

SEQ ID NO: 564 - DNA, 19 bp, Artificial Sequence
  Detection oligonucleotide for GPIb beta
tagagtaagtcgggttgtt

SEQ ID NO: 565 - DNA, 18 bp, Artificial Sequence
  Detection oligonucleotide for GPIb beta
ggttaggtcgtagtattg

SEQ ID NO: 566 - DNA, 18 bp, Artificial Sequence
  Detection oligonucleotide for GPIb beta
ggttaggttgtagtattg

SEQ ID NO: 567 - DNA, 18 bp, Artificial Sequence
  Detection oligonucleotide for MYOD1
atagtagtcgggtgttgg

SEQ ID NO: 568 - DNA, 18 bp, Artificial Sequence
  Detection oligonucleotide for MYOD1
atagtagttgggtgttgg

SEQ ID NO: 569 - DNA, 18 bp, Artificial Sequence
  Detection oligonucleotide for MYOD1
tagttgttcgtttgggtt

SEQ ID NO: 570 - DNA, 18 bp, Artificial Sequence
  Detection oligonucleotide for MYOD1
tagttgtttgtttgggtt

SEQ ID NO: 571 - DNA, 18 bp, Artificial Sequence
  Detection oligonucleotide for WT1
tttagtttcgatttttgg

SEQ ID NO: 572 - DNA, 18 bp, Artificial Sequence
  Detection oligonucleotide for WT1
tttagttttgatttttgg

SEQ ID NO: 573 - DNA, 18 bp, Artificial Sequence
  Detection oligonucleotide for HLA-F
atagggtacgttaaggtt

SEQ ID NO: 574 - DNA, 18 bp, Artificial Sequence
  Detection oligonucleotide for HLA-F
atagggtatgttaaggtt

SEQ ID NO: 575 - DNA, 18 bp, Artificial Sequence
  Detection oligonucleotide for HLA-F
gagagaaacggtttttgt

SEQ ID NO: 576 - DNA, 18 bp, Artificial Sequence
  Detection oligonucleotide for HLA-F
gagagaaatggtttttgt

SEQ ID NO: 577 - DNA, 18 bp, Artificial Sequence
  Detection oligonucleotide for ELK1
tgtttaatcgtagagttg

SEQ ID NO: 578 - DNA, 18 bp, Artificial Sequence
  Detection oligonucleotide for ELK1
tgtttaattgtagagttg

SEQ ID NO: 579 - DNA, 18 bp, Artificial Sequence
  Detection oligonucleotide for ELK1
tttgttttcgttgagtag

SEQ ID NO: 580 - DNA, 18 bp, Artificial Sequence
  Detection oligonucleotide for ELK1
tttgtttttgttgagtag

SEQ ID NO: 581 - DNA, 18 bp, Artificial Sequence
  Detection oligonucleotide for ELK1
gaagggttcgttttttaa

SEQ ID NO: 582 - DNA, 18 bp, Artificial Sequence
  Detection oligonucleotide for ELK1
gaagggtttgttttttaa

SEQ ID NO: 583 - DNA, 18 bp, Artificial Sequence
  Detection oligonucleotide for ELK1
attaatagcgttttggtt

SEQ ID NO: 584 - DNA, 18 bp, Artificial Sequence
  Detection oligonucleotide for ELK1
attaatagtgttttggtt

SEQ ID NO: 585 - DNA, 18 bp, Artificial Sequence
  Detection oligonucleotide for APC
tatttagcggattatata

SEQ ID NO: 586 - DNA, 18 bp, Artificial Sequence
  Detection oligonucleotide for APC
tatttagtggattatata

SEQ ID NO: 587 - DNA, 18 bp, Artificial Sequence
  Detection oligonucleotide for APC
aaggttatcggtttaaga

SEQ ID NO: 588 - DNA, 18 bp, Artificial Sequence
  Detection oligonucleotide for APC
aaggttattggtttaaga

SEQ ID NO: 589 - DNA, 18 bp, Artificial Sequence
  Detection oligonucleotide for APC
gggggacgacgtttttgt

SEQ ID NO: 590 - DNA, 18 bp, Artificial Sequence
  Detection oligonucleotide for APC
gggggatgatgtttttgt

SEQ ID NO: 591 - DNA, 18 bp, Artificial Sequence
  Detection oligonucleotide for BCL2
agtgtttcgcgtgattga

SEQ ID NO: 592 - DNA, 18 bp, Artificial Sequence
  Detection oligonucleotide for BCL2
agtgttttgtgtgattga

SEQ ID NO: 593 - DNA, 18 bp, Artificial Sequence
  Detection oligonucleotide for BCL2
taagttgtcgtagagggg

SEQ ID NO: 594 - DNA, 18 bp, Artificial Sequence
  Detection oligonucleotide for BCL2
taagttgttgtagagggg

SEQ ID NO: 595 - DNA, 18 bp, Artificial Sequence
  Detection oligonucleotide for BCL2
ggatttcgtcgttgtaga

SEQ ID NO: 596 - DNA, 18 bp, Artificial Sequence
  Detection oligonucleotide for BCL2
ggattttgttgttgtaga

SEQ ID NO: 597 - DNA, 18 bp, Artificial Sequence
  Detection oligonucleotide for CALCA
gagggtgacgtaatttag

SEQ ID NO: 598 - DNA, 18 bp, Artificial Sequence
  Detection oligonucleotide for CALCA
gagggtgatgtaatttag

SEQ ID NO: 599 - DNA, 18 bp, Artificial Sequence
  Detection oligonucleotide for CALCA
tgtattggcggaattttt

SEQ ID NO: 600 - DNA, 18 bp, Artificial Sequence
  Detection oligonucleotide for CALCA
tgtattggtggaattttt

SEQ ID NO: 601 - DNA, 18 bp, Artificial Sequence
  Detection oligonucleotide for CALCA
gttagtttcgggatattt

SEQ ID NO: 602 - DNA, 18 bp, Artificial Sequence
  Detection oligonucleotide for CALCA
gttagttttgggatattt

SEQ ID NO: 603 - DNA, 18 bp, Artificial Sequence
  Detection oligonucleotide for CDH1
tagaggatcgtttgagtt

SEQ ID NO: 604 - DNA, 18 bp, Artificial Sequence
  Detection oligonucleotide for CDH1
tagaggattgtttgagtt

SEQ ID NO: 605 - DNA, 18 bp, Artificial Sequence
  Detection oligonucleotide for CDH1
gttgtgatcgtattattg

SEQ ID NO: 606 - DNA, 18 bp, Artificial Sequence
  Detection oligonucleotide for CDH1
gttgtgattgtattattg

SEQ ID NO: 607 - DNA, 18 bp, Artificial Sequence
  Detection oligonucleotide for CDH1
ttgggattcgaatttagt

SEQ ID NO: 608 - DNA, 18 bp, Artificial Sequence
  Detection oligonucleotide for CDH1
ttgggatttgaatttagt

SEQ ID NO: 609 - DNA, 18 bp, Artificial Sequence
  Detection oligonucleotide for CDKN1A
aggtgtatcgtttttata

SEQ ID NO: 610 - DNA, 18 bp, Artificial Sequence
  Detection oligonucleotide for CDKN1A
aggtgtattgtttttata

SEQ ID NO: 611 - DNA, 18 bp, Artificial Sequence
  Detection oligonucleotide for CDKN1A
tgggttagcggtgagtta

SEQ ID NO: 612 - DNA, 18 bp, Artificial Sequence
  Detection oligonucleotide for CDKN1A
tgggttagtggtgagtta

SEQ ID NO: 613 - DNA, 18 bp, Artificial Sequence
  Detection oligonucleotide for CDKN1A
gtttatttcgtggggaaa

SEQ ID NO: 614 - DNA, 18 bp, Artificial Sequence
  Detection oligonucleotide for CDKN1A
gtttattttgtggggaaa

SEQ ID NO: 615 - DNA, 18 bp, Artificial Sequence
  Detection oligonucleotide for CDKN1A
ttggaattcggttaggtt

SEQ ID NO: 616 - DNA, 18 bp, Artificial Sequence
  Detection oligonucleotide for CDKN1A
ttggaatttggttaggtt

SEQ ID NO: 617 - DNA, 18 bp, Artificial Sequence
  Detection oligonucleotide for CDKN1B (p27 Kip1)
aagagaaacgttggaata

SEQ ID NO: 618 - DNA, 18 bp, Artificial Sequence
  Detection oligonucleotide for CDKN1B (p27 Kip1)
aagagaaatgttggaata

SEQ ID NO: 619 - DNA, 18 bp, Artificial Sequence
  Detection oligonucleotide for CDKN1B (p27 Kip1)
tttgatttcgaggggagt

SEQ ID NO: 620 - DNA, 18 bp, Artificial Sequence
  Detection oligonucleotide for CDKN1B (p27 Kip1)
tttgattttgaggggagt

SEQ ID NO: 621 - DNA, 18 bp, Artificial Sequence
  Detection oligonucleotide for CDKN1B (p27 Kip1)
gtatttggcggttggatt

SEQ ID NO: 622 - DNA, 18 bp, Artificial Sequence
  Detection oligonucleotide for CDKN1B (p27 Kip1)
gtatttggtggttggatt

SEQ ID NO: 623 - DNA, 18 bp, Artificial Sequence
  Detection oligonucleotide for CDKN1B (p27 Kip1)
tataatttcgggaaagaa

SEQ ID NO: 624 - DNA, 18 bp, Artificial Sequence
  Detection oligonucleotide for CDKN1B (p27 Kip1)
tataattttgggaaagaa

SEQ ID NO: 625 - DNA, 18 bp, Artificial Sequence
  Detection oligonucleotide for CDKN2a
agagtgaacgtatttaaa

SEQ ID NO: 626 - DNA, 18 bp, Artificial Sequence
  Detection oligonucleotide for CDKN2a
agagtgaatgtatttaaa

SEQ ID NO: 627 - DNA, 18 bp, Artificial Sequence
  Detection oligonucleotide for CDKN2a
gatagggtcggagggggt

SEQ ID NO: 628 - DNA, 18 bp, Artificial Sequence
  Detection oligonucleotide for CDKN2a
gatagggttggagggggt

SEQ ID NO: 629 - DNA, 18 bp, Artificial Sequence
  Detection oligonucleotide for CDKN2B
atatttagcgagtagtgt

SEQ ID NO: 630 - DNA, 18 bp, Artificial Sequence
  Detection oligonucleotide for CDKN2B
atatttagtgagtagtgt

SEQ ID NO: 631 - DNA, 18 bp, Artificial Sequence
  Detection oligonucleotide for CDKN2B
atagggggcggagtttaa

SEQ ID NO: 632 - DNA, 18 bp, Artificial Sequence
  Detection oligonucleotide for CDKN2B
atagggggtggagtttaa

SEQ ID NO: 633 - DNA, 18 bp, Artificial Sequence
  Detection oligonucleotide for CDKN2B
ttattgtacggggtttta

SEQ ID NO: 634 - DNA, 18 bp, Artificial Sequence
  Detection oligonucleotide for CDKN2B
ttattgtatggggtttta

SEQ ID NO: 635 - DNA, 18 bp, Artificial Sequence
  Detection oligonucleotide for CDKN2B
ttttaagtcgtagaagga

SEQ ID NO: 636 - DNA, 18 bp, Artificial Sequence
  Detection oligonucleotide for CDKN2B
ttttaagttgtagaagga

SEQ ID NO: 637 - DNA, 18 bp, Artificial Sequence
  Detection oligonucleotide for CD44
ggtagtttcgattattta

SEQ ID NO: 638 - DNA, 18 bp, Artificial Sequence
  Detection oligonucleotide for CD44
ggtagttttgattattta

SEQ ID NO: 639 - DNA, 18 bp, Artificial Sequence
  Detection oligonucleotide for CD44
tggtggtacgtagtttgg

SEQ ID NO: 640 - DNA, 18 bp, Artificial Sequence
  Detection oligonucleotide for CD44
tggtggtatgtagtttgg

SEQ ID NO: 641 - DNA, 18 bp, Artificial Sequence
  Detection oligonucleotide for CSPG2
atgtgattcgtttgggta

SEQ ID NO: 642 - DNA, 18 bp, Artificial Sequence
  Detection oligonucleotide for CSPG2
atgtgatttgtttgggta

SEQ ID NO: 643 - DNA, 18 bp, Artificial Sequence
  Detection oligonucleotide for DAPK1
gttggagtcgaggtttga

SEQ ID NO: 644 - DNA, 18 bp, Artificial Sequence
  Detection oligonucleotide for DAPK1
gttggagttgaggtttga

SEQ ID NO: 645 - DNA, 18 bp, Artificial Sequence
  Detection oligonucleotide for DAPK1
ttttttgtcggattggtg

SEQ ID NO: 646 - DNA, 18 bp, Artificial Sequence
  Detection oligonucleotide for DAPK1
ttttttgttggattggtg

SEQ ID NO: 647 - DNA, 18 bp, Artificial Sequence
  Detection oligonucleotide for EGFR
gatgatttcgagggtgtt

SEQ ID NO: 648 - DNA, 18 bp, Artificial Sequence
  Detection oligonucleotide for EGFR
gatgattttgagggtgtt

SEQ ID NO: 649 - DNA, 18 bp, Artificial Sequence
  Detection oligonucleotide for EGFR
gagggtttcgtagtgttg

SEQ ID NO: 650 - DNA, 18 bp, Artificial Sequence
  Detection oligonucleotide for EGFR
gagggttttgtagtgttg

SEQ ID NO: 651 - DNA, 18 bp, Artificial Sequence
  Detection oligonucleotide for EGFR
tggggattcgaataaagg

SEQ ID NO: 652 - DNA, 18 bp, Artificial Sequence
  Detection oligonucleotide for EGFR
tggggatttgaataaagg

SEQ ID NO: 653 - DNA, 18 bp, Artificial Sequence
  Detection oligonucleotide for EYA4
tatatatacgtgtgggta

SEQ ID NO: 654 - DNA, 18 bp, Artificial Sequence
  Detection oligonucleotide for EYA4
tatatatatgtgtgggta

SEQ ID NO: 655 - DNA, 18 bp, Artificial Sequence
  Detection oligonucleotide for EYA4
tttagatacgaaatgtta

SEQ ID NO: 656 - DNA, 18 bp, Artificial Sequence
  Detection oligonucleotide for EYA4
tttagatatgaaatgtta

SEQ ID NO: 657 - DNA, 18 bp, Artificial Sequence
  Detection oligonucleotide for GSTP1
ggttttttcggttagttg

SEQ ID NO: 658 - DNA, 18 bp, Artificial Sequence
  Detection oligonucleotide for GSTP1
ggtttttttggttagttg

SEQ ID NO: 659 - DNA, 18 bp, Artificial Sequence
  Detection oligonucleotide for GSTP1
gtagttttcgttattagt

SEQ ID NO: 660 - DNA, 18 bp, Artificial Sequence
  Detection oligonucleotide for GSTP1
gtagtttttgttattagt

SEQ ID NO: 661 - DNA, 18 bp, Artificial Sequence
  Detection oligonucleotide for GTBP/MSH6
ttttgtcggacggagttt

SEQ ID NO: 662 - DNA, 18 bp, Artificial Sequence
  Detection oligonucleotide for GTBP/MSH6
ttttgttggatggagttt

SEQ ID NO: 663 - DNA, 18 bp, Artificial Sequence
  Detection oligonucleotide for GTBP/MSH6
aaggtttaatcgttttgt

SEQ ID NO: 664 - DNA, 18 bp, Artificial Sequence
  Detection oligonucleotide for GTBP/MSH6
aaggtttaattgttttgt

SEQ ID NO: 665 - DNA, 18 bp, Artificial Sequence
  Detection oligonucleotide for HIC-1
ttaaaacggcgtataggg

SEQ ID NO: 666 - DNA, 18 bp, Artificial Sequence
  Detection oligonucleotide for HIC-1
ttaaaatggtgtataggg

SEQ ID NO: 667 - DNA, 18 bp, Artificial Sequence
  Detection oligonucleotide for HIC-1
aggagattcgaaagttta

SEQ ID NO: 668 - DNA, 18 bp, Artificial Sequence
  Detection oligonucleotide for HIC-1
aggagatttgaaagttta

SEQ ID NO: 669 - DNA, 18 bp, Artificial Sequence
  Detection oligonucleotide for HRAS
atagtgggcgtaattggt

SEQ ID NO: 670 - DNA, 18 bp, Artificial Sequence
  Detection oligonucleotide for HRAS
atagtgggtgtaattggt

SEQ ID NO: 671 - DNA, 18 bp, Artificial Sequence
  Detection oligonucleotide for HRAS
aaattggacgtttagttg

SEQ ID NO: 672 - DNA, 18 bp, Artificial Sequence
  Detection oligonucleotide for HRAS
aaattggatgtttagttg

SEQ ID NO: 673 - DNA, 18 bp, Artificial Sequence
  Detection oligonucleotide for HRAS
tagaagtcgagagatttg

SEQ ID NO: 674 - DNA, 18 bp, Artificial Sequence
  Detection oligonucleotide for HRAS
tagaagttgagagatttg

SEQ ID NO: 675 - DNA, 18 bp, Artificial Sequence
  Detection oligonucleotide for HRAS
gaatatttcgaagtttgt

SEQ ID NO: 676 - DNA, 18 bp, Artificial Sequence
  Detection oligonucleotide for HRAS
gaatattttgaagtttgt

SEQ ID NO: 677 - DNA, 18 bp, Artificial Sequence
  Detection oligonucleotide for IGF2
ggttattacgataatttg

SEQ ID NO: 678 - DNA, 18 bp, Artificial Sequence
  Detection oligonucleotide for IGF2
ggttattatgataatttg

SEQ ID NO: 679 - DNA, 18 bp, Artificial Sequence
  Detection oligonucleotide for IGF2
tggagtttacggaggttt

SEQ ID NO: 680 - DNA, 18 bp, Artificial Sequence
  Detection oligonucleotide for IGF2
tggagtttatggaggttt

SEQ ID NO: 681 - DNA, 18 bp, Artificial Sequence
  Detection oligonucleotide for LKB1
ttaattaacgggtgggta

SEQ ID NO: 682 - DNA, 18 bp, Artificial Sequence
  Detection oligonucleotide for LKB1
ttaattaatgggtgggta

SEQ ID NO: 683 - DNA, 18 bp, Artificial Sequence
  Detection oligonucleotide for MGMT
taaggatacgagttatat

SEQ ID NO: 684 - DNA, 18 bp, Artificial Sequence
  Detection oligonucleotide for MGMT
taaggatatgagttatat

SEQ ID NO: 685 - DNA, 18 bp, Artificial Sequence
  Detection oligonucleotide for MGMT
ttggagagcggttgagtt

SEQ ID NO: 686 - DNA, 18 bp, Artificial Sequence
  Detection oligonucleotide for MGMT
ttggagagtggttgagtt

SEQ ID NO: 687 - DNA, 18 bp, Artificial Sequence
  Detection oligonucleotide for MGMT
taggttatcggtgattgt

SEQ ID NO: 688 - DNA, 18 bp, Artificial Sequence
  Detection oligonucleotide for MGMT
taggttattggtgattgt

SEQ ID NO: 689 - DNA, 18 bp, Artificial Sequence
  Detection oligonucleotide for MGMT
taggggagcggttttagg

SEQ ID NO: 690 - DNA, 18 bp, Artificial Sequence
  Detection oligonucleotide for MGMT
taggggagtggttttagg

SEQ ID NO: 691 - DNA, 18 bp, Artificial Sequence
  Detection oligonucleotide for MLH1
ttgagaagcgttaagtat

SEQ ID NO: 692 - DNA, 18 bp, Artificial Sequence
  Detection oligonucleotide for MLH1
ttgagaagtgttaagtat

SEQ ID NO: 693 - DNA, 18 bp, Artificial Sequence
  Detection oligonucleotide for MLH1
gtagtagtcgttttaggg

SEQ ID NO: 694 - DNA, 18 bp, Artificial Sequence
  Detection oligonucleotide for MLH1
gtagtagttgttttaggg

SEQ ID NO: 695 - DNA, 18 bp, Artificial Sequence
  Detection oligonucleotide for MLH1
atagttgtcgttgaaggg

SEQ ID NO: 696 - DNA, 18 bp, Artificial Sequence
  Detection oligonucleotide for MLH1
atagttgttgttgaaggg

SEQ ID NO: 697 - DNA, 18 bp, Artificial Sequence
  Detection oligonucleotide for MLH1
ttggatggcgtaagttat

SEQ ID NO: 698 - DNA, 18 bp, Artificial Sequence
  Detection oligonucleotide for MLH1
ttggatggtgtaagttat

SEQ ID NO: 699 - DNA, 18 bp, Artificial Sequence
  Detection oligonucleotide for MNCA9
taaaagggcgttttgtga

SEQ ID NO: 700 - DNA, 18 bp, Artificial Sequence
  Detection oligonucleotide for MNCA9
taaaagggtgttttgtga

SEQ ID NO: 701 - DNA, 18 bp, Artificial Sequence
  Detection oligonucleotide for MNCA9
tagttagtcgtatggttt

SEQ ID NO: 702 - DNA, 18 bp, Artificial Sequence
  Detection oligonucleotide for MNCA9
tagttagttgtatggttt

SEQ ID NO: 703 - DNA, 18 bp, Artificial Sequence
  Detection oligonucleotide for MNCA9
gatttattcggagaggag

SEQ ID NO: 704 - DNA, 18 bp, Artificial Sequence
  Detection oligonucleotide for MNCA9
gatttatttggagaggag

SEQ ID NO: 705 - DNA, 18 bp, Artificial Sequence
  Detection oligonucleotide for MSH3
atttttcgttcgatgata

SEQ ID NO: 706 - DNA, 18 bp, Artificial Sequence
  Detection oligonucleotide for MSH3
attttttgtttgatgata

SEQ ID NO: 707 - DNA, 18 bp, Artificial Sequence
  Detection oligonucleotide for MSH3
agtttagtcggggttata

SEQ ID NO: 708 - DNA, 18 bp, Artificial Sequence
  Detection oligonucleotide for MSH3
agtttagttggggttata

SEQ ID NO: 709 - DNA, 18 bp, Artificial Sequence
  Detection oligonucleotide for MSH3
gggtgaagcgttgaggtt

SEQ ID NO: 710 - DNA, 18 bp, Artificial Sequence
  Detection oligonucleotide for MSH3
gggtgaagtgttgaggtt

SEQ ID NO: 711 - DNA, 18 bp, Artificial Sequence
  Detection oligonucleotide for MYC
ttagagtgttcggttgtt

SEQ ID NO: 712 - DNA, 18 bp, Artificial Sequence
  Detection oligonucleotide for MYC
ttagagtgtttggttgtt

SEQ ID NO: 713 - DNA, 18 bp, Artificial Sequence
  Detection oligonucleotide for MYC
aggattttcgagttgtgt

SEQ ID NO: 714 - DNA, 18 bp, Artificial Sequence
  Detection oligonucleotide for MYC
aggatttttgagttgtgt

SEQ ID NO: 715 - DNA, 18 bp, Artificial Sequence
  Detection oligonucleotide for MYC
aattttagcgagaggtag

SEQ ID NO: 716 - DNA, 18 bp, Artificial Sequence
  Detection oligonucleotide for MYC
aattttagtgagaggtag

SEQ ID NO: 717 - DNA, 18 bp, Artificial Sequence
  Detection oligonucleotide for PAX6
tattgtttcggttgttag

SEQ ID NO: 718 - DNA, 18 bp, Artificial Sequence
  Detection oligonucleotide for PAX6
tattgttttggttgttag

SEQ ID NO: 719 - DNA, 18 bp, Artificial Sequence
  Detection oligonucleotide for PAX6
gttagtagcgagtttagg

SEQ ID NO: 720 - DNA, 18 bp, Artificial Sequence
  Detection oligonucleotide for PAX6
gttagtagtgagtttagg

SEQ ID NO: 721 - DNA, 18 bp, Artificial Sequence
  Detection oligonucleotide for PAX6
agagtttagcgtattttt

SEQ ID NO: 722 - DNA, 18 bp, Artificial Sequence
  Detection oligonucleotide for PAX6
agagtttagtgtattttt

SEQ ID NO: 723 - DNA, 18 bp, Artificial Sequence
  Detection oligonucleotide for PGR
gaatttagcgagggattg

SEQ ID NO: 724 - DNA, 18 bp, Artificial Sequence
  Detection oligonucleotide for PGR
gaatttagtgagggattg

SEQ ID NO: 725 - DNA, 18 bp, Artificial Sequence
  Detection oligonucleotide for PGR
agtatgtacgagtttgat

SEQ ID NO: 726 - DNA, 18 bp, Artificial Sequence
  Detection oligonucleotide for PGR
agtatgtatgagtttgat

SEQ ID NO: 727 - DNA, 18 bp, Artificial Sequence
  Detection oligonucleotide for PGR
gggataaacgatagttat

SEQ ID NO: 728 - DNA, 18 bp, Artificial Sequence
  Detection oligonucleotide for PGR
gggataaatgatagttat

SEQ ID NO: 729 - DNA, 18 bp, Artificial Sequence
  Detection oligonucleotide for PTEN
agagtttgcggtttgggg

SEQ ID NO: 730 - DNA, 19 bp, Artificial Sequence
  Detection oligonucleotide for PTEN
agagtttgtggtttggggt

SEQ ID NO: 731 - DNA, 18 bp, Artificial Sequence
  Detection oligonucleotide for RARB
gggtttatcgaaagttta

SEQ ID NO: 732 - DNA, 18 bp, Artificial Sequence
  Detection oligonucleotide for RARB
gggtttattgaaagttta

SEQ ID NO: 733 - DNA, 18 bp, Artificial Sequence
  Detection oligonucleotide for RARB
agtttattcgtatatatt

SEQ ID NO: 734 - DNA, 18 bp, Artificial Sequence
  Detection oligonucleotide for RARB
agtttatttgtatatatt

SEQ ID NO: 735 - DNA, 18 bp, Artificial Sequence
  Detection oligonucleotide for RARB
tttttatgcgagttgttt

SEQ ID NO: 736 - DNA, 18 bp, Artificial Sequence
  Detection oligonucleotide for RARB
tttttatgtgagttgttt

SEQ ID NO: 737 - DNA, 18 bp, Artificial Sequence
  Detection oligonucleotide for SFN
atagagttcggtattggt

SEQ ID NO: 738 - DNA, 18 bp, Artificial Sequence
  Detection oligonucleotide for SFN
atagagtttggtattggt

SEQ ID NO: 739 - DNA, 18 bp, Artificial Sequence
  Detection oligonucleotide for SFN
gtaggtcgaacgttatga

SEQ ID NO: 740 - DNA, 18 bp, Artificial Sequence
  Detection oligonucleotide for SFN
gtaggttgaatgttatga

SEQ ID NO: 741 - DNA, 18 bp, Artificial Sequence
  Detection oligonucleotide for SFN
aaaagtaacgaggagggt

SEQ ID NO: 742 - DNA, 18 bp, Artificial Sequence
  Detection oligonucleotide for SFN
aaaagtaatgaggagggt

SEQ ID NO: 743 - DNA, 18 bp, Artificial Sequence
  Detection oligonucleotide for S100A2
tttaattgcggttgtgtg

SEQ ID NO: 744 - DNA, 18 bp, Artificial Sequence
  Detection oligonucleotide for S100A2
tttaattgtggttgtgtg

SEQ ID NO: 745 - DNA, 18 bp, Artificial Sequence
  Detection oligonucleotide for S100A2
tatataggcgtatgtatg

SEQ ID NO: 746 - DNA, 18 bp, Artificial Sequence
  Detection oligonucleotide for S100A2
tatataggtgtatgtatg

SEQ ID NO: 747 - DNA, 18 bp, Artificial Sequence
  Detection oligonucleotide for S100A2
agttttagcgtgtgttta

SEQ ID NO: 748 - DNA, 18 bp, Artificial Sequence
  Detection oligonucleotide for S100A2
agttttagtgtgtgttta

SEQ ID NO: 749 - DNA, 18 bp, Artificial Sequence
  Detection oligonucleotide for TGFBR2
atttggagcgaggaattt

SEQ ID NO: 750 - DNA, 18 bp, Artificial Sequence
  Detection oligonucleotide for TGFBR2
atttggagtgaggaattt

SEQ ID NO: 751 - DNA, 18 bp, Artificial Sequence
  Detection oligonucleotide for TGFBR2
ttgaaagtcggttaaagt

SEQ ID NO: 752 - DNA, 18 bp, Artificial Sequence
  Detection oligonucleotide for TGFBR2
ttgaaagttggttaaagt

SEQ ID NO: 753 - DNA, 18 bp, Artificial Sequence
  Detection oligonucleotide for TGFBR2
ggtagttacgagagagtt

SEQ ID NO: 754 - DNA, 18 bp, Artificial Sequence
  Detection oligonucleotide for TGFBR2
ggtagttatgagagagtt

SEQ ID NO: 755 - DNA, 18 bp, Artificial Sequence
  Detection oligonucleotide for TIMP3
aggtttttcgttggagaa

SEQ ID NO: 756 - DNA, 18 bp, Artificial Sequence
  Detection oligonucleotide for TIMP3
aggttttttgttggagaa

SEQ ID NO: 757 - DNA, 18 bp, Artificial Sequence
  Detection oligonucleotide for TIMP3
gaaaatatcggtattttg

SEQ ID NO: 758 - DNA, 18 bp, Artificial Sequence
  Detection oligonucleotide for TIMP3
gaaaatattggtattttg

SEQ ID NO: 759 - DNA, 18 bp, Artificial Sequence
  Detection oligonucleotide for TIMP3
gggataagcgaatttttt

SEQ ID NO: 760 - DNA, 18 bp, Artificial Sequence
  Detection oligonucleotide for TIMP3
gggataagtgaatttttt

SEQ ID NO: 761 - DNA, 18 bp, Artificial Sequence
  Detection oligonucleotide for TIMP3
ttttattacgtatgtttt

SEQ ID NO: 762 - DNA, 18 bp, Artificial Sequence
  Detection oligonucleotide for TIMP3
ttttattatgtatgtttt

SEQ ID NO: 763 - DNA, 18 bp, Artificial Sequence
  Detection oligonucleotide for TP53
aagttgaacgtttaggta

SEQ ID NO: 764 - DNA, 18 bp, Artificial Sequence
  Detection oligonucleotide for TP53
aagttgaatgtttaggta

SEQ ID NO: 765 - DNA, 18 bp, Artificial Sequence
  Detection oligonucleotide for TP53
ttttgagtcggtttaaag

SEQ ID NO: 766 - DNA, 18 bp, Artificial Sequence
  Detection oligonucleotide for TP53
ttttgagttggtttaaag

SEQ ID NO: 767 - DNA, 18 bp, Artificial Sequence
  Detection oligonucleotide for TP53
tatttattcggtgttggg

SEQ ID NO: 768 - DNA, 18 bp, Artificial Sequence
  Detection oligonucleotide for TP53
tatttatttggtgttggg

SEQ ID NO: 769 - DNA, 18 bp, Artificial Sequence
  Detection oligonucleotide for TP53
ttggatttcgaaatattg

SEQ ID NO: 770 - DNA, 18 bp, Artificial Sequence
  Detection oligonucleotide for TP53
ttggattttgaaatattg

SEQ ID NO: 771 - DNA, 18 bp, Artificial Sequence
  Detection oligonucleotide for TP73
tgatttagcgtaggtttg

SEQ ID NO: 772 - DNA, 18 bp, Artificial Sequence
  Detection oligonucleotide for TP73
tgatttagtgtaggtttg

SEQ ID NO: 773 - DNA, 18 bp, Artificial Sequence
  Detection oligonucleotide for TP73
ttagagttcgagtttata

SEQ ID NO: 774 - DNA, 18 bp, Artificial Sequence
  Detection oligonucleotide for TP73
ttagagtttgagtttata

SEQ ID NO: 775 - DNA, 18 bp, Artificial Sequence
  Detection oligonucleotide for TP73
ggaagtttcgatggttta

SEQ ID NO: 776 - DNA, 18 bp, Artificial Sequence
  Detection oligonucleotide for TP73
ggaagttttgatggttta

SEQ ID NO: 777 - DNA, 18 bp, Artificial Sequence
  Detection oligonucleotide for VHL
tttataagcgtgatgatt

SEQ ID NO: 778 - DNA, 18 bp, Artificial Sequence
  Detection oligonucleotide for VHL
tttataagtgtgatgatt

SEQ ID NO: 779 - DNA, 18 bp, Artificial Sequence
  Detection oligonucleotide for VHL
ggtgttttcgtgtgagat

SEQ ID NO: 780 - DNA, 18 bp, Artificial Sequence
  Detection oligonucleotide for VHL
ggtgtttttgtgtgagat

SEQ ID NO: 781 - DNA, 18 bp, Artificial Sequence
  Detection oligonucleotide for VHL
tgtgagatgcgttatttt

SEQ ID NO: 782 - DNA, 18 bp, Artificial Sequence
  Detection oligonucleotide for VHL
tgtgagatgtgttatttt

SEQ ID NO: 783 - DNA, 18 bp, Artificial Sequence
  Detection oligonucleotide for VHL
tatattgcgcgtttgata

SEQ ID NO: 784 - DNA, 18 bp, Artificial Sequence
  Detection oligonucleotide for VHL
tatattgtgtgtttgata

SEQ ID NO: 785 - DNA, 18 bp, Artificial Sequence
  Detection oligonucleotide for CDKN1C
atgaagaacggttaaggg

SEQ ID NO: 786 - DNA, 18 bp, Artificial Sequence
  Detection oligonucleotide for CDKN1C
atgaagaatggttaaggg

SEQ ID NO: 787 - DNA, 18 bp, Artificial Sequence
  Detection oligonucleotide for CDKN1C
ttttatttcgagttaggt

SEQ ID NO: 788 - DNA, 18 bp, Artificial Sequence
  Detection oligonucleotide for CDKN1C
ttttattttgagttaggt

SEQ ID NO: 789 - DNA, 18 bp, Artificial Sequence
  Detection oligonucleotide for CDKN1C
ttaagttacggttattag

SEQ ID NO: 790 - DNA, 18 bp, Artificial Sequence
  Detection oligonucleotide for CDKN1C
ttaagttatggttattag

SEQ ID NO: 791 - DNA, 18 bp, Artificial Sequence
  Detection oligonucleotide for CDKN1C
ttagtgttcgtttggaat

SEQ ID NO: 792 - DNA, 18 bp, Artificial Sequence
  Detection oligonucleotide for CDKN1C
ttagtgtttgtttggaat

SEQ ID NO: 793 - DNA, 18 bp, Artificial Sequence
  Detection oligonucleotide for CAV1
ttggtatcgttgaagaat

SEQ ID NO: 794 - DNA, 18 bp, Artificial Sequence
  Detection oligonucleotide for CAV1
ttggtattgttgaagaat

SEQ ID NO: 795 - DNA, 18 bp, Artificial Sequence
  Detection oligonucleotide for CAV1
tgggggttcgaaaaagtg

SEQ ID NO: 796 - DNA, 18 bp, Artificial Sequence
  Detection oligonucleotide for CAV1
tgggggtttgaaaaagtg

SEQ ID NO: 797 - DNA, 18 bp, Artificial Sequence
  Detection oligonucleotide for CAV1
gaagtgttcgtttttgtt

SEQ ID NO: 798 - DNA, 18 bp, Artificial Sequence
  Detection oligonucleotide for CAV1
gaagtgtttgtttttgtt

SEQ ID NO: 799 - DNA, 18 bp, Artificial Sequence
  Detection oligonucleotide for CDH13
gaagtggtcgttagtttt

SEQ ID NO: 800 - DNA, 19 bp, Artificial Sequence
  Detection oligonucleotide for CDH13
gaagtggttgttagttttt

SEQ ID NO: 801 - DNA, 18 bp, Artificial Sequence
  Detection oligonucleotide for CDH13
ttgtttagcgtgatttgt

SEQ ID NO: 802 - DNA, 18 bp, Artificial Sequence
  Detection oligonucleotide for CDH13
ttgtttagtgtgatttgt

SEQ ID NO: 803 - DNA, 18 bp, Artificial Sequence
  Detection oligonucleotide for DRG1
gagtaggacggtgttaag

SEQ ID NO: 804 - DNA, 18 bp, Artificial Sequence
  Detection oligonucleotide for DRG1
gagtaggatggtgttaag

SEQ ID NO: 805 - DNA, 18 bp, Artificial Sequence
  Detection oligonucleotide for DRG1
aaatttaacgttgggtag

SEQ ID NO: 806 - DNA, 18 bp, Artificial Sequence
  Detection oligonucleotide for DRG1
aaatttaatgttgggtag

SEQ ID NO: 807 - DNA, 18 bp, Artificial Sequence
  Detection oligonucleotide for DRG1
gataatgacggtgttagt

SEQ ID NO: 808 - DNA, 18 bp, Artificial Sequence
  Detection oligonucleotide for DRG1
gataatgatggtgttagt

SEQ ID NO: 809 - DNA, 18 bp, Artificial Sequence
  Detection oligonucleotide for DRG1
tggttgtacgttaggagt

SEQ ID NO: 810 - DNA, 18 bp, Artificial Sequence
  Detection oligonucleotide for DRG1
tggttgtatgttaggagt

SEQ ID NO: 811 - DNA, 18 bp, Artificial Sequence
  Detection oligonucleotide for PTGS2
atttaaggcgattagttt

SEQ ID NO: 812 - DNA, 18 bp, Artificial Sequence
  Detection oligonucleotide for PTGS2
atttaaggtgattagttt

SEQ ID NO: 813 - DNA, 18 bp, Artificial Sequence
  Detection oligonucleotide for THBS1
ggagagttagcgagggtt

SEQ ID NO: 814 - DNA, 18 bp, Artificial Sequence
  Detection oligonucleotide for THBS1
ggagagttagtgagggtt

SEQ ID NO: 815 - DNA, 18 bp, Artificial Sequence
  Detection oligonucleotide for THBS1
tattttaacgaatggttt

SEQ ID NO: 816 - DNA, 18 bp, Artificial Sequence
  Detection oligonucleotide for THBS1
tattttaatgaatggttt

SEQ ID NO: 817 - DNA, 18 bp, Artificial Sequence
  Detection oligonucleotide for THBS1
ttataaaacgggtttagt

SEQ ID NO: 818 - DNA, 18 bp, Artificial Sequence
  Detection oligonucleotide for THBS1
ttataaaatgggtttagt

SEQ ID NO: 819 - DNA, 18 bp, Artificial Sequence
  Detection oligonucleotide for THBS1
aggtatttcgggagatta

SEQ ID NO: 820 - DNA, 18 bp, Artificial Sequence
  Detection oligonucleotide for THBS1
aggtattttgggagatta

SEQ ID NO: 821 - DNA, 18 bp, Artificial Sequence
  Detection oligonucleotide for DNMT1
agtgggttcgtttaagtt

SEQ ID NO: 822 - DNA, 18 bp, Artificial Sequence
  Detection oligonucleotide for DNMT1
agtgggtttgtttaagtt

SEQ ID NO: 823 - DNA, 18 bp, Artificial Sequence
  Detection oligonucleotide for DNMT1
ttttttacgcggagtagt

SEQ ID NO: 824 - DNA, 18 bp, Artificial Sequence
  Detection oligonucleotide for DNMT1
ttttttatgtggagtagt

SEQ ID NO: 825 - DNA, 18 bp, Artificial Sequence
  Detection oligonucleotide for DNMT1
gagagaggcgatattttg

SEQ ID NO: 826 - DNA, 18 bp, Artificial Sequence
  Detection oligonucleotide for DNMT1
gagagaggtgatattttg

SEQ ID NO: 827 - DNA, 18 bp, Artificial Sequence
  Detection oligonucleotide for DNMT1
gtattaaacggagagagg

SEQ ID NO: 828 - DNA, 18 bp, Artificial Sequence
  Detection oligonucleotide for DNMT1
gtattaaatggagagagg

SEQ ID NO: 829 - DNA, 18 bp, Artificial Sequence
  Detection oligonucleotide for CEA
ttttgagtcgtagtttag

SEQ ID NO: 830 - DNA, 18 bp, Artificial Sequence
  Detection oligonucleotide for CEA
ttttgagttgtagtttag

SEQ ID NO: 831 - DNA, 18 bp, Artificial Sequence
  Detection oligonucleotide for CEA
aatagatacggagaggga

SEQ ID NO: 832 - DNA, 18 bp, Artificial Sequence
  Detection oligonucleotide for CEA
aatagatatggagaggga

SEQ ID NO: 833 - DNA, 18 bp, Artificial Sequence
  Detection oligonucleotide for MB
agaaggtgcgtgagaggt

SEQ ID NO: 834 - DNA, 18 bp, Artificial Sequence
  Detection oligonucleotide for MB
agaaggtgtgtgagaggt

SEQ ID NO: 835 - DNA, 18 bp, Artificial Sequence
  Detection oligonucleotide for MB
gggttagtcggggtattt

SEQ ID NO: 836 - DNA, 18 bp, Artificial Sequence
  Detection oligonucleotide for MB
gggttagttggggtattt

SEQ ID NO: 837 - DNA, 18 bp, Artificial Sequence
  Detection oligonucleotide for MB
ggggatagcgagttattg

SEQ ID NO: 838 - DNA, 18 bp, Artificial Sequence
  Detection oligonucleotide for MB
ggggatagtgagttattg

SEQ ID NO: 839 - DNA, 18 bp, Artificial Sequence
  Detection oligonucleotide for MB
ttagattgcgttatgggg

SEQ ID NO: 840 - DNA, 18 bp, Artificial Sequence
  Detection oligonucleotide for MB
ttagattgtgttatgggg

SEQ ID NO: 841 - DNA, 18 bp, Artificial Sequence
  Detection oligonucleotide for PCNA
tatggatacgattggttt

SEQ ID NO: 842 - DNA, 18 bp, Artificial Sequence
  Detection oligonucleotide for PCNA
tatggatatgattggttt

SEQ ID NO: 843 - DNA, 18 bp, Artificial Sequence
  Detection oligonucleotide for PCNA
gtattaaacggttgtagg

SEQ ID NO: 844 - DNA, 18 bp, Artificial Sequence
  Detection oligonucleotide for PCNA
gtattaaatggttgtagg

SEQ ID NO: 845 - DNA, 18 bp, Artificial Sequence
  Detection oligonucleotide for PCNA
tttgaagtcgaaattagt

SEQ ID NO: 846 - DNA, 18 bp, Artificial Sequence
  Detection oligonucleotide for PCNA
tttgaagttgaaattagt

SEQ ID NO: 847 - DNA, 18 bp, Artificial Sequence
  Detection oligonucleotide for CDC2
tggaatttcgatgtaaat

SEQ ID NO: 848 - DNA, 18 bp, Artificial Sequence
  Detection oligonucleotide for CDC2
tggaattttgatgtaaat

SEQ ID NO: 849 - DNA, 18 bp, Artificial Sequence
  Detection oligonucleotide for CDC2
tagtaggacgatattttt

SEQ ID NO: 850 - DNA, 18 bp, Artificial Sequence
  Detection oligonucleotide for CDC2
tagtaggatgatattttt

SEQ ID NO: 851 - DNA, 18 bp, Artificial Sequence
  Detection oligonucleotide for CDC2
tagttattcgggaaggtt

SEQ ID NO: 852 - DNA, 18 bp, Artificial Sequence
  Detection oligonucleotide for CDC2
tagttatttgggaaggtt

SEQ ID NO: 853 - DNA, 18 bp, Artificial Sequence
  Detection oligonucleotide for CDC2
aaattgttcgtatttggt

SEQ ID NO: 854 - DNA, 18 bp, Artificial Sequence
  Detection oligonucleotide for CDC2
aaattgtttgtatttggt

SEQ ID NO: 855 - DNA, 18 bp, Artificial Sequence
  Detection oligonucleotide for ESR1
agatatatcggagtttgg

SEQ ID NO: 856 - DNA, 18 bp, Artificial Sequence
  Detection oligonucleotide for ESR1
agatatattggagtttgg

SEQ ID NO: 857 - DNA, 18 bp, Artificial Sequence
  Detection oligonucleotide for ESR1
gtttggtacggggtatat

SEQ ID NO: 858 - DNA, 18 bp, Artificial Sequence
  Detection oligonucleotide for ESR1
gtttggtatggggtatat

SEQ ID NO: 859 - DNA, 18 bp, Artificial Sequence
  Detection oligonucleotide for ESR1
ttttaaatcgagttgtgt

SEQ ID NO: 860 - DNA, 18 bp, Artificial Sequence
  Detection oligonucleotide for ESR1
ttttaaattgagttgtgt

SEQ ID NO: 861 - DNA, 18 bp, Artificial Sequence
  Detection oligonucleotide for ESR1
tatgagttcgggagatta

SEQ ID NO: 862 - DNA, 18 bp, Artificial Sequence
  Detection oligonucleotide for ESR1
tatgagtttgggagatta

SEQ ID NO: 863 - DNA, 18 bp, Artificial Sequence
  Detection oligonucleotide for CASP8
gaatgagtcgaggaaggt

SEQ ID NO: 864 - DNA, 18 bp, Artificial Sequence
  Detection oligonucleotide for CASP8
gaatgagttgaggaaggt

SEQ ID NO: 865 - DNA, 18 bp, Artificial Sequence
  Detection oligonucleotide for CASP8
tattgagacgttaagtaa

SEQ ID NO: 866 - DNA, 18 bp, Artificial Sequence
  Detection oligonucleotide for CASP8
tattgagatgttaagtaa

SEQ ID NO: 867 - DNA, 18 bp, Artificial Sequence
  Detection oligonucleotide for CASP8
taaggttacgtagttagt

SEQ ID NO: 868 - DNA, 18 bp, Artificial Sequence
  Detection oligonucleotide for CASP8
taaggttatgtagttagt

SEQ ID NO: 869 - DNA, 18 bp, Artificial Sequence
  Detection oligonucleotide for CASP8
gttaatagcggggatttt

SEQ ID NO: 870 - DNA, 18 bp, Artificial Sequence
  Detection oligonucleotide for CASP8
gttaatagtggggatttt

SEQ ID NO: 871 - DNA, 18 bp, Artificial Sequence
  Detection oligonucleotide for RASSF1
gtagttttcgagaatgtt

SEQ ID NO: 872 - DNA, 18 bp, Artificial Sequence
  Detection oligonucleotide for RASSF1
gtagtttttgagaatgtt

SEQ ID NO: 873 - DNA, 18 bp, Artificial Sequence
  Detection oligonucleotide for RASSF1
taattagaacgttttttg

SEQ ID NO: 874 - DNA, 18 bp, Artificial Sequence
  Detection oligonucleotide for RASSF1
taattagaatgttttttg

SEQ ID NO: 875 - DNA, 18 bp, Artificial Sequence
  Detection oligonucleotide for RASSF1
tagttttcgcgtagaatt

SEQ ID NO: 876 - DNA, 18 bp, Artificial Sequence
  Detection oligonucleotide for RASSF1
tagtttttgtgtagaatt

SEQ ID NO: 877 - DNA, 18 bp, Artificial Sequence
  Detection oligonucleotide for MSH4
ttgtttcggcggtttttt

SEQ ID NO: 878 - DNA, 18 bp, Artificial Sequence
  Detection oligonucleotide for MSH4
ttgttttggtggtttttt

SEQ ID NO: 879 - DNA, 18 bp, Artificial Sequence
  Detection oligonucleotide for MSH4
ttttggtacgttaggagt

SEQ ID NO: 880 - DNA, 18 bp, Artificial Sequence
  Detection oligonucleotide for MSH4
ttttggtatgttaggagt

SEQ ID NO: 881 - DNA, 18 bp, Artificial Sequence
  Detection oligonucleotide for MSH4
taaattttcggttagttt

SEQ ID NO: 882 - DNA, 18 bp, Artificial Sequence
  Detection oligonucleotide for MSH4
taaatttttggttagttt

SEQ ID NO: 883 - DNA, 18 bp, Artificial Sequence
  Detection oligonucleotide for MSH4
ttagaggtcggtagttta

SEQ ID NO: 884 - DNA, 18 bp, Artificial Sequence
  Detection oligonucleotide for MSH4
ttagaggttggtagttta

SEQ ID NO: 885 - DNA, 18 bp, Artificial Sequence
  Detection oligonucleotide for MSH5
atgtttatcgttttgagt

SEQ ID NO: 886 - DNA, 18 bp, Artificial Sequence
  Detection oligonucleotide for MSH5
atgtttattgttttgagt

SEQ ID NO: 887 - DNA, 18 bp, Artificial Sequence
  Detection oligonucleotide for MSH5
atagttgtcgaatgtatg

SEQ ID NO: 888 - DNA, 18 bp, Artificial Sequence
  Detection oligonucleotide for MSH5
atagttgttgaatgtatg

SEQ ID NO: 889 - DNA, 18 bp, Artificial Sequence
  Detection oligonucleotide for MSH5
tagaagtgcgaaggggta

SEQ ID NO: 890 - DNA, 18 bp, Artificial Sequence
  Detection oligonucleotide for MSH5
tagaagtgtgaaggggta

SEQ ID NO: 891 - DNA, 18 bp, Artificial Sequence
  Detection oligonucleotide for MSH5
atgtaattcgaatgtttt

SEQ ID NO: 892 - DNA, 18 bp, Artificial Sequence
  Detection oligonucleotide for MSH5
atgtaatttgaatgtttt

SEQ ID NO: 893 - DNA, 18 bp, Artificial Sequence
  Detection oligonucleotide for CDH13
aatgttttcgtgatgttg

SEQ ID NO: 894 - DNA, 18 bp, Artificial Sequence
  Detection oligonucleotide for CDH13
aatgtttttgtgatgttg

SEQ ID NO: 895 - DNA, 18 bp, Artificial Sequence
  Detection oligonucleotide for CD44
ttgtttagcggattttag

SEQ ID NO: 896 - DNA, 18 bp, Artificial Sequence
  Detection oligonucleotide for CD44
ttgtttagtggattttag

SEQ ID NO: 897 - DNA, 18 bp, Artificial Sequence
  Detection oligonucleotide for TPEF (=TMEFF2; =HPP1)
aatttgcgaacgtttggg

SEQ ID NO: 898 - DNA, 18 bp, Artificial Sequence
  Detection oligonucleotide for TPEF (=TMEFF2; =HPP1)
aatttgtgaatgtttggg

SEQ ID NO: 899 - DNA, 18 bp, Artificial Sequence
  Detection oligonucleotide for CSPG2
gggtaacgtcgaatttag

SEQ ID NO: 900 - DNA, 18 bp, Artificial Sequence
  Detection oligonucleotide for CSPG2
gggtaatgttgaatttag

SEQ ID NO: 901 - DNA, 18 bp, Artificial Sequence
  Detection oligonucleotide for CDH13
aaggaattcgttttgtaa

SEQ ID NO: 902 - DNA, 18 bp, Artificial Sequence
  Detection oligonucleotide for CDH13
aaggaatttgttttgtaa

SEQ ID NO: 903 - DNA, 18 bp, Artificial Sequence
  Detection oligonucleotide for GSTP1
ggagttcgcgggattttt

SEQ ID NO: 904 - DNA, 18 bp, Artificial Sequence
  Detection oligonucleotide for GSTP1
ggagtttgtgggattttt

SEQ ID NO: 905 - DNA, 18 bp, Artificial Sequence
  Detection oligonucleotide for TGFBR2
aaagttttcggaggggtt

SEQ ID NO: 906 - DNA, 18 bp, Artificial Sequence
  Detection oligonucleotide for TGFBR2
aaagtttttggaggggtt

SEQ ID NO: 907 - DNA, 18 bp, Artificial Sequence
  Detection oligonucleotide for N33
tgttatttcggagggttt

SEQ ID NO: 908 - DNA, 18 bp, Artificial Sequence
  Detection oligonucleotide for N33
tgttattttggagggttt

SEQ ID NO: 909 - DNA, 18 bp, Artificial Sequence
  Detection oligonucleotide for CAV1
tagattcggaggtaggta

SEQ ID NO: 910 - DNA, 18 bp, Artificial Sequence
  Detection oligonucleotide for CAV1
tagatttggaggtaggta

SEQ ID NO: 911 - DNA, 18 bp, Artificial Sequence
  Detection oligonucleotide for PTGS2
tttattttcgtgggtaaa

SEQ ID NO: 912 - DNA, 18 bp, Artificial Sequence
  Detection oligonucleotide for PTGS2
tttatttttgtgggtaaa

SEQ ID NO: 913 - DNA, 18 bp, Artificial Sequence
  Detection oligonucleotide for TP73
aagttacgggttttattg

SEQ ID NO: 914 - DNA, 18 bp, Artificial Sequence
  Detection oligonucleotide for TP73
aagttatgggttttattg

SEQ ID NO: 915 - DNA, 18 bp, Artificial Sequence
  Detection oligonucleotide for TPEF (=TMEFF2; =HPP1)
ataggttacgggttggag

SEQ ID NO: 916 - DNA, 18 bp, Artificial Sequence
  Detection oligonucleotide for TPEF (=TMEFF2; =HPP1)
ataggttatgggttggag

SEQ ID NO: 917 - DNA, 18 bp, Artificial Sequence
  Detection oligonucleotide for CD44
gtggggttcggaggtata

SEQ ID NO: 918 - DNA, 18 bp, Artificial Sequence
  Detection oligonucleotide for CD44
gtggggtttggaggtata

SEQ ID NO: 919 - DNA, 18 bp, Artificial Sequence
  Detection oligonucleotide for EYA4
aagtaagtcgttgttgtt

SEQ ID NO: 920 - DNA, 18 bp, Artificial Sequence
  Detection oligonucleotide for EYA4
aagtaagttgttgttgtt

SEQ ID NO: 921 - DNA, 18 bp, Artificial Sequence
  Detection oligonucleotide for EYA4
agtgtatgcgtagaaggt

SEQ ID NO: 922 - DNA, 18 bp, Artificial Sequence
  Detection oligonucleotide for EYA4
agtgtatgtgtagaaggt

SEQ ID NO: 923 - DNA, 18 bp, Artificial Sequence
  Detection oligonucleotide for GTBP/MSH6
tttgttggcgggaaattt

SEQ ID NO: 924 - DNA, 18 bp, Artificial Sequence
  Detection oligonucleotide for GTBP/MSH6
tttgttggtgggaaattt

SEQ ID NO: 925 - DNA, 18 bp, Artificial Sequence
  Detection oligonucleotide for EGR4
ggagttttcggtatatat

SEQ ID NO: 926 - DNA, 18 bp, Artificial Sequence
  Detection oligonucleotide for EGR4
ggagtttttggtatatat

SEQ ID NO: 927 - DNA, 18 bp, Artificial Sequence
  Detection oligonucleotide for CDH1
tagtggcgtcggaattgt

SEQ ID NO: 928 - DNA, 18 bp, Artificial Sequence
  Detection oligonucleotide for CDH1
tagtggtgttggaattgt

SEQ ID NO: 929 - DNA, 18 bp, Artificial Sequence
  Detection oligonucleotide for EGFR
atttggttcgatttggat

SEQ ID NO: 930 - DNA, 18 bp, Artificial Sequence
  Detection oligonucleotide for EGFR
atttggtttgatttggat

SEQ ID NO: 931 - DNA, 18 bp, Artificial Sequence
  Detection oligonucleotide for LKB1
agggaggtcgttggtatt

SEQ ID NO: 932 - DNA, 18 bp, Artificial Sequence
  Detection oligonucleotide for LKB1
agggaggttgttggtatt

SEQ ID NO: 933 - DNA, 18 bp, Artificial Sequence
  Detection oligonucleotide for DAPK1
ttgtttttcggaaatttg

SEQ ID NO: 934 - DNA, 18 bp, Artificial Sequence
  Detection oligonucleotide for DAPK1
ttgttttttggaaatttg

SEQ ID NO: 935 - DNA, 18 bp, Artificial Sequence
  Detection oligonucleotide for IGF2
gattagggcgggaaatat

SEQ ID NO: 936 - DNA, 18 bp, Artificial Sequence
  Detection oligonucleotide for IGF2
gattagggtgggaaatat

SEQ ID NO: 937 - DNA, 18 bp, Artificial Sequence
  Detection oligonucleotide for HLA-F
tatttgggcgggtgagtg

SEQ ID NO: 938 - DNA, 18 bp, Artificial Sequence
  Detection oligonucleotide for HLA-F
tatttgggtgggtgagtg

SEQ ID NO: 939 - DNA, 18 bp, Artificial Sequence
  Detection oligonucleotide for IGF2
ttgtatggtcgagtttat

SEQ ID NO: 940 - DNA, 18 bp, Artificial Sequence
  Detection oligonucleotide for IGF2
ttgtatggttgagtttat

SEQ ID NO: 941 - DNA, 18 bp, Artificial Sequence
  Detection oligonucleotide for N33
gtttagttagcgggtttt

SEQ ID NO: 942 - DNA, 18 bp, Artificial Sequence
  Detection oligonucleotide for N33
gtttagttagtgggtttt

SEQ ID NO: 943 - DNA, 18 bp, Artificial Sequence
  Detection oligonucleotide for CSPG2
aaaaattcgcgagtttag

SEQ ID NO: 944 - DNA, 18 bp, Artificial Sequence
  Detection oligonucleotide for CSPG2
aaaaatttgtgagtttag

SEQ ID NO: 945 - DNA, 18 bp, Artificial Sequence
  Detection oligonucleotide for PTEN
tgatgtggcgggattttt

SEQ ID NO: 946 - DNA, 18 bp, Artificial Sequence
  Detection oligonucleotide for PTEN
tgatgtggtgggattttt

SEQ ID NO: 947 - DNA, 18 bp, Artificial Sequence
  Detection oligonucleotide for MLH1
ttaggtagcgggtagtag

SEQ ID NO: 948 - DNA, 18 bp, Artificial Sequence
  Detection oligonucleotide for MLH1
ttaggtagtgggtagtag

SEQ ID NO: 949 - DNA, 18 bp, Artificial Sequence
  Detection oligonucleotide for GTBP/MSH6
gaggaattcgggttttag

SEQ ID NO: 950 - DNA, 18 bp, Artificial Sequence
  Detection oligonucleotide for GTBP/MSH6
gaggaatttgggttttag

SEQ ID NO: 951 - DNA, 18 bp, Artificial Sequence
  Detection oligonucleotide for CALCA
attaggttcgtgttttag

SEQ ID NO: 952 - DNA, 18 bp, Artificial Sequence
  Detection oligonucleotide for CALCA
attaggtttgtgttttag

SEQ ID NO: 953 - DNA, 18 bp, Artificial Sequence
  Detection oligonucleotide for DAPK1
gaagggagcgtattttat

SEQ ID NO: 954 - DNA, 18 bp, Artificial Sequence
  Detection oligonucleotide for DAPK1
gaagggagtgtattttat

SEQ ID NO: 955 - DNA, 18 bp, Artificial Sequence
  Detection oligonucleotide for PTEN
agagttatcgttttgttt

SEQ ID NO: 956 - DNA, 18 bp, Artificial Sequence
  Detection oligonucleotide for PTEN
agagttattgttttgttt

SEQ ID NO: 957 - DNA, 18 bp, Artificial Sequence
  Detection oligonucleotide for WT1
tgttatatcggttagttg

SEQ ID NO: 958 - DNA, 18 bp, Artificial Sequence
  Detection oligonucleotide for WT1
tgttatattggttagttg

SEQ ID NO: 959 - DNA, 18 bp, Artificial Sequence
  Detection oligonucleotide for EGFR
tttgtattcggagttggg

SEQ ID NO: 960 - DNA, 18 bp, Artificial Sequence
  Detection oligonucleotide for EGFR
tttgtatttggagttggg

SEQ ID NO: 961 - DNA, 18 bp, Artificial Sequence
  Detection oligonucleotide for CSPG2
aagattttcggttagttt

SEQ ID NO: 962 - DNA, 18 bp, Artificial Sequence
  Detection oligonucleotide for CSPG2
aagatttttggttagttt

SEQ ID NO: 963 - DNA, 18 bp, Artificial Sequence
  Detection oligonucleotide for LKB1
tttaggttcgtaagttta

SEQ ID NO: 964 - DNA, 18 bp, Artificial Sequence
  Detection oligonucleotide for LKB1
tttaggtttgtaagttta

SEQ ID NO: 965 - DNA, 18 bp, Artificial Sequence
  Detection oligonucleotide for WT1
tatattggcgaaggttaa

SEQ ID NO: 966 - DNA, 18 bp, Artificial Sequence
  Detection oligonucleotide for WT1
tatattggtgaaggttaa

SEQ ID NO: 967 - DNA, 18 bp, Artificial Sequence
  Detection oligonucleotide for ESR1
tggaggttcgggagttta

SEQ ID NO: 968 - DNA, 18 bp, Artificial Sequence
  Detection oligonucleotide for ESR1
tggaggtttgggagttta

SEQ ID NO: 969 - DNA, 18 bp, Artificial Sequence
  Detection oligonucleotide for APC
tttaatcgtatagtttgt

SEQ ID NO: 970 - DNA, 18 bp, Artificial Sequence
  Detection oligonucleotide for APC
tttaattgtatagtttgt

SEQ ID NO: 971 - DNA, 18 bp, Artificial Sequence
  Detection oligonucleotide for IGF2
agtttgaacgatgtaaga

SEQ ID NO: 972 - DNA, 18 bp, Artificial Sequence
  Detection oligonucleotide for IGF2
agtttgaatgatgtaaga

SEQ ID NO: 973 - DNA, 18 bp, Artificial Sequence
  Detection oligonucleotide for MYOD1
aattaggtcggataggag

SEQ ID NO: 974 - DNA, 18 bp, Artificial Sequence
  Detection oligonucleotide for MYOD1
aattaggttggataggag

SEQ ID NO: 975 - DNA, 18 bp, Artificial Sequence
  Detection oligonucleotide for N33
ttggttcgggaaaggtaa

SEQ ID NO: 976 - DNA, 18 bp, Artificial Sequence
  Detection oligonucleotide for N33
ttggtttgggaaaggtaa

SEQ ID NO: 977 - DNA, 18 bp, Artificial Sequence
  Detection oligonucleotide for TPEF (=TMEFF2; =HPP1)
atttgtttcgattaattt

SEQ ID NO: 978 - DNA, 18 bp, Artificial Sequence
  Detection oligonucleotide for TPEF (=TMEFF2; =HPP1)
atttgttttgattaattt

SEQ ID NO: 979 - DNA, 18 bp, Artificial Sequence
  Detection oligonucleotide for CDKN2a
aatagttacggtcggagg

SEQ ID NO: 980 - DNA, 18 bp, Artificial Sequence
  Detection oligonucleotide for CDKN2a
aatagttatggttggagg

SEQ ID NO: 981 - DNA, 18 bp, Artificial Sequence
  Detection oligonucleotide for CDH1
agggttatcgcgtttatg

SEQ ID NO: 982 - DNA, 18 bp, Artificial Sequence
  Detection oligonucleotide for CDH1
agggttattgtgtttatg

SEQ ID NO: 983 - DNA, 18 bp, Artificial Sequence
  Detection oligonucleotide for APC
tattttggcgggttgtat

SEQ ID NO: 984 - DNA, 18 bp, Artificial Sequence
  Detection oligonucleotide for APC
tattttggtgggttgtat

SEQ ID NO: 985 - DNA, 18 bp, Artificial Sequence
  Detection oligonucleotide for PTEN
attttgcgttcgtattta

SEQ ID NO: 986 - DNA, 18 bp, Artificial Sequence
  Detection oligonucleotide for PTEN
attttgtgtttgtattta

SEQ ID NO: 987 - DNA, 18 bp, Artificial Sequence
  Detection oligonucleotide for HLA-F
agttgtttcgtagatatt

SEQ ID NO: 988 - DNA, 18 bp, Artificial Sequence
  Detection oligonucleotide for HLA-F
agttgttttgtagatatt

SEQ ID NO: 989 - DNA, 18 bp, Artificial Sequence
  Detection oligonucleotide for RARB
tagtagttcgggtagggt

SEQ ID NO: 990 - DNA, 18 bp, Artificial Sequence
  Detection oligonucleotide for RARB
tagtagtttgggtagggt

SEQ ID NO: 991 - DNA, 18 bp, Artificial Sequence
  Detection oligonucleotide for N33
atttagttcgggggagga

SEQ ID NO: 992 - DNA, 18 bp, Artificial Sequence
  Detection oligonucleotide for N33
atttagtttgggggagga

SEQ ID NO: 993 - DNA, 18 bp, Artificial Sequence
  Detection oligonucleotide for RASSF1
tttgtagcgggtggagta

SEQ ID NO: 994 - DNA, 18 bp, Artificial Sequence
  Detection oligonucleotide for RASSF1
tttgtagtgggtggagta

SEQ ID NO: 995 - DNA, 18 bp, Artificial Sequence
  Detection oligonucleotide for CDKN2a
ggagttttcggttgattg

SEQ ID NO: 996 - DNA, 18 bp, Artificial Sequence
  Detection oligonucleotide for CDKN2a
ggagtttttggttgattg

SEQ ID NO: 997 - DNA, 18 bp, Artificial Sequence
  Detection oligonucleotide for S100A2
tatgtatacgagtattgg

SEQ ID NO: 998 - DNA, 18 bp, Artificial Sequence
  Detection oligonucleotide for S100A2
tatgtatatgagtattgg

SEQ ID NO: 999 - DNA, 18 bp, Artificial Sequence
  Detection oligonucleotide for MGMT
agtaggatcgggattttt

SEQ ID NO: 1000 - DNA, 18 bp, Artificial Sequence
  Detection oligonucleotide for MGMT
agtaggattgggattttt

SEQ ID NO: 1001 - DNA, 18 bp, Artificial Sequence
  Detection oligonucleotide for CEA
aagtgttcgcggttgttt

SEQ ID NO: 1002 - DNA, 18 bp, Artificial Sequence
  Detection oligonucleotide for CEA
aagtgtttgtggttgttt

SEQ ID NO: 1003 - DNA, 18 bp, Artificial Sequence
  Detection oligonucleotide for GPIb beta
ggagttcggtcgggtttt

SEQ ID NO: 1004 - DNA, 18 bp, Artificial Sequence
  Detection oligonucleotide for GPIb beta
ggagtttggttgggtttt

SEQ ID NO: 1005 - DNA, 18 bp, Artificial Sequence
  Detection oligonucleotide for PTGS2
agttatttcgttatatgg

SEQ ID NO: 1006 - DNA, 18 bp, Artificial Sequence
  Detection oligonucleotide for PTGS2
agttattttgttatatgg

SEQ ID NO: 1007 - DNA, 18 bp, Artificial Sequence
  Detection oligonucleotide for MYOD1
gtgttagtcgtttagggt

SEQ ID NO: 1008 - DNA, 18 bp, Artificial Sequence
  Detection oligonucleotide for MYOD1
gtgttagttgtttagggt

SEQ ID NO: 1009 - DNA, 18 bp, Artificial Sequence
  Detection oligonucleotide for PGR
ttaagtgtcggatttgtg

SEQ ID NO: 1010 - DNA, 18 bp, Artificial Sequence
  Detection oligonucleotide for PGR
ttaagtgttggatttgtg

SEQ ID NO: 1011 - DNA, 18 bp, Artificial Sequence
  Detection oligonucleotide for PCNA
taaagaggcggggagatt

SEQ ID NO: 1012 - DNA, 18 bp, Artificial Sequence
  Detection oligonucleotide for PCNA
taaagaggtggggagatt

SEQ ID NO: 1013 - DNA, 18 bp, Artificial Sequence
  Detection oligonucleotide for MSH3
agtattttcgtttgagga

SEQ ID NO: 1014 - DNA, 18 bp, Artificial Sequence
  Detection oligonucleotide for MSH3
agtatttttgtttgagga

SEQ ID NO: 1015 - DNA, 18 bp, Artificial Sequence
  Detection oligonucleotide for WT1
tagtgagacgaggttttt

SEQ ID NO: 1016 - DNA, 18 bp, Artificial Sequence
  Detection oligonucleotide for WT1
tagtgagatgaggttttt

SEQ ID NO: 1017 - DNA, 18 bp, Artificial Sequence
  Detection oligonucleotide for MYC
ttataatgcgagggtttg

SEQ ID NO: 1018 - DNA, 18 bp, Artificial Sequence
  Detection oligonucleotide for MYC
ttataatgtgagggtttg

SEQ ID NO: 1019 - DNA, 18 bp, Artificial Sequence
  Detection oligonucleotide for HIC-1
ttttagagcgttagggtt

SEQ ID NO: 1020 - DNA, 18 bp, Artificial Sequence
  Detection oligonucleotide for HIC-1
ttttagagtgttagggtt

SEQ ID NO: 1021 - DNA, 18 bp, Artificial Sequence
  Detection oligonucleotide for PTGS2
atatttggcggaaatttg

SEQ ID NO: 1022 - DNA, 18 bp, Artificial Sequence
  Detection oligonucleotide for PTGS2
atatttggtggaaatttg

SEQ ID NO: 1023 - DNA, 18 bp, Artificial Sequence
  Detection oligonucleotide for BCL2
ttttgttacggtggtgga

SEQ ID NO: 1024 - DNA, 18 bp, Artificial Sequence
  Detection oligonucleotide for BCL2
ttttgttatggtggtgga

SEQ ID NO: 1025 - DNA, 18 bp, Artificial Sequence
  Detection oligonucleotide for AR
agaggttgcgttttagag

SEQ ID NO: 1026 - DNA, 18 bp, Artificial Sequence
  Detection oligonucleotide for AR
agaggttgtgttttagag

SEQ ID NO: 1027 - DNA, 18 bp, Artificial Sequence
  Detection oligonucleotide for CDKN2a
gttgttttcggttggtgt

SEQ ID NO: 1028 - DNA, 18 bp, Artificial Sequence
  Detection oligonucleotide for CDKN2a
gttgtttttggttggtgt

What is claimed is:

1. A method for detecting colorectal cancer or colon adenomas or risk thereof in a human subject, comprising:
a) contacting genomic DNA in a biological sample obtained from the subject comprising colorectal DNA, with a reagent or series of reagents comprising at least one of bisulfite, hydrogen sulfite or disulfite;
b) comparing the nucleic acid sequence of untreated genomic DNA as set forth in SEQ ID NO: 54 to corresponding nucleic acid sequence derived from SEQ ID NO: 54 by bisulfite treatment according to method step a) based on the differential base-pairing properties of uracil and cytosine;
c) determining the methylation status of one or more CpG dinucleotides within the genomic region defined in method step b) by detecting unconverted cytosine bases in this region; and
d) detecting colorectal cancer or colon adenomas or risk thereof in the human subject by comparing the methylation state of at least one CpG position within the nucleic acid sequence of method step b) to the methylation state of the same CpG position or positions in genomic DNA derived from a human control subject not suffering from colorectal cancer or colon adenomas, wherein a higher degree of CpG methylation in the sample, compared to that of the control, indicates a presence or an increased likelihood of colorectal cancer or colon adenomas.

2. The method of claim 1, wherein in method step c) a portion or fragment of the treated DNA derived from SEQ ID NO: 54 is amplified by means of a polymerase chain reaction (PCR) to provide an amplificate.

3. The method of claim 2, wherein at least 10 different fragments, each fragment having a length of 10 to 200 base pairs, are amplified.

4. The method of claim 2, wherein the amplification step is carried out using one or more sets of primer oligonucleotides suitable to amplify a nucleic acid sequence selected from the group consisting of SEQ ID NOs: 239, 240, 367 and 368 and amplifiable portions thereof.

5. The method of claim 2, wherein determining the methylation status of at least one CpG dinucleotide comprised by SEQ ID NO: 54 comprises hybridization of the amplificate to oligonucleotides or peptide nucleic acid (PNA) oligomers.

6. The method of claim 2, wherein the amplificates are labeled with a fluorescent label.

7. The method of claim 1, wherein the method differentiates between normal colon tissue and a tissue selected from the group consisting of colon adenoma tissue and colon carcinoma tissue.
